(19) United States
(12) Patent Application Publication
(10) Pub. No.: US 2010/0162432 A1
(43) Pub. Date: Jun. 24, 2010

(54) PLANT CELLS AND PLANTS WITH INCREASED TOLERANCE AND/OR RESISTANCE TO ENVIRONMENTAL STRESS AND INCREASED BIOMASS PRODUCTION-KO

(75) Inventors: Piotr Puzio, Mariakerke (BE); Oliver Bläsing, Potsdam (DE); Oliver Thimm, Berlin (DE)

Correspondence Address: CONNOLLY BOVE LODGE & HUTZ, LLP, P O BOX 2207, WILMINGTON, DE, 19899, US

(73) Assignee: BASF Plant Science GmbH, Limburgerhof (DE)

(21) Appl. No.: 12/601,053

(22) PCT Filed: May 19, 2008
(86) PCT No.: PCT/EP08/56091

§ 371 Date: Nov. 20, 2009

(30) Foreign Application Priority Data
May 22, 2007 (EP) 07108576.5
May 22, 2007 (EP) 07108577.3

(51) Int. Cl. A01H 1/06; A01H 1/00; C07H 21/00; C07H 21/02; C07K 16/00; C07K 2/00; C12N 15/63; C12N 5/04; A01H 5/00; C07K 1/00; C12Q 1/02

(52) U.S. Cl. 800/276; 800/278; 536/23.1; 536/23.5; 530/387.1; 536/24.33; 530/300; 435/320.1; 435/419; 800/298; 435/412; 435/416; 435/417; 435/414; 435/411; 800/320.1; 800/320.3; 800/320; 800/320.2; 800/314; 800/322; 800/317; 800/317.2; 800/317.1; 800/317.3; 800/317.4; 530/333; 435/29

(57) ABSTRACT

The invention relates generally to transformed plant cells and plants comprising an in-activated or down-regulated gene resulting in increased tolerance and/or resistance to environmental stress and increased biomass production as compared to non-transformed wild type cells and methods of producing such plant cells or plants.

[0001] This invention relates generally to transformed plant cells and plants comprising an inactivated or down-regulated gene resulting in increased tolerance and/or resistance to environmental stress and increased biomass production as compared to non-transformed wild type cells and methods of producing such plant cells or plants.

[0002] In particular, this invention relates to plants tailored to grow under conditions of water deficiency.

[0003] The invention also deals with methods of producing and screening for and breeding such plant cells or plants.

[0004] Under field conditions, plant performance in terms of growth, development, biomass accumulation and yield depends on acclimation ability to the environmental changes and stresses. Abiotic environmental stresses such as drought stress, salinity stress, heat stress and cold stress, are major limiting factors of plant growth and productivity (Boyer. 1982. Science 218, 443-448). Plants exposed to heat and/or low water or drought conditions typically have low yields of plant material, seeds, fruit and other edible products. Crop losses and crop yield losses of major crops such as rice, maize (corn) and wheat caused by these stresses represent a significant economic and political factor and contribute to food shortages in many underdeveloped countries.

[0005] Drought, heat, cold and salt stress have a common theme important for plant growth and that is water availability. Plants are typically exposed during their life cycle to conditions of reduced environmental water content. Most plants have evolved strategies to protect themselves against these conditions of low water or desiccation. However, if the severity and duration of the drought conditions are too great, the effects on plant development, growth and yield of most crop plants are profound. Continuous exposure to drought causes major alterations in the plant metabolism. These great changes in metabolism ultimately lead to cell death and consequently yield losses.

[0006] Developing stress-tolerant and/or resistant plants is a strategy that has the potential to solve or mediate at least some of these problems (McKersie and Leshem, 1994. Stress and Stress Coping in Cultivated Plants, Kluwer Academic Publishers). However, traditional plant breeding strategies to develop new lines of plants that exhibit resistance (tolerance) to these types of stress are relatively slow and require specific resistant lines for crossing with the desired line. Limited germplasm resources for stress tolerance and incompatibility in crosses between distantly related plant species represent significant problems encountered in conventional breeding. Additionally, the cellular processes leading to drought, cold and salt tolerance and/or resistance are complex in nature and involve multiple mechanisms of cellular adaptation and numerous metabolic pathways (McKersie and Leshem, 1994. Stress and Stress Coping in Cultivated Plants, Kluwer Academic Publishers). This multicomponent nature of stress tolerance and/or resistance has not only made breeding for tolerance and/or resistance largely unsuccessful, but has also limited the ability to genetically engineer stress tolerance plants using biotechnological methods.

[0007] Plants are exposed during their life cycle also to heat, cold and salt stress. The protection strategies are similar to those of drought resistance. Since high salt content in some soils results in less available water for cell intake, its effect is similar to those observed under drought conditions. Likewise, under freezing temperatures, plant cells loose water as a result of ice formation that starts in the apoplast and withdraws water from the symplast (McKersie and Leshem, 1994. Stress and Stress Coping in Cultivated Plants, Kluwer Academic Publishers). Physiologically these stresses are also interconnected and may induce similar cellular damage. For example drought and salt stress are manifested primarily as osmotic stress, leading to the disruption of homeostasis and ion distribution in the cell (Serrano et al., 1999; Zhu, 2001a; Wang et al., 2003). Oxidative stress, which frequently accompanies high temperature, salinity or drought stress, may cause denaturation of functional or structural proteins (Smirnoff, 1998). As a consequence these abiotic stresses often activate similar signaling pathways (Shinozaki and Ymaguchi-Shinozaki, 2000; Knight and Knight, 2001; Zhu 2001b, 2002) and cellular responses, e.g. the production of certain stress proteins, antioxidants and compatible solutes (Vierling and Kimpel, 1992; Zhu et al., 1997; .Cushman and Bohnert, 2000).

[0008] Plant with increased resistance to abiotic stress by gene knock-out are known from WO 2004/092349 A and WO 2006/032707.

[0009] Generally the transformed and stress resistant plants exhibit slower growth and reduced biomass due to a decreased growth rate (Serrano et al.), due to an imbalance in development and physiology of the plant, thus having significant fitness cost (Kasuga et al., 1999, Danby and Gehring et al., 2005). Despite maintaining basic metabolic function this leads to severe biomass and yield loss. Sometimes the root/shoot dry weight ratio increase as plant water stress develops. The increase is mostly due to a relative reduction in shoot dry weight. The ratio of seed yield to above-ground dry weight is relatively stable under many environmental conditions and so a robust correlation between plant size and grain yield can often be obtained. These processes are intrinsically linked because the majority of grain biomass is dependent on current stored photosynthetic productivity by the leaves and stem of the plant. Therefore selecting for plant size, even at early stages of development, has been used as an indicator for future potential.

[0010] In some cases (US20060037108) an increased biomass, mainly a greater shoot biomass was observed after a drought treatment by withholding water for 6 to 8 days.

[0011] The results of current research indicate that drought tolerance and/or resistance is a complex quantitative trait and that no real diagnostic marker is available yet. This lack of a mechanistic understanding makes it difficult to design a transgenic approach to improve water stress tolerance and/or resistance.

[0012] Plant stress-regulated genes, whose expression are dependent on plant growth under different stress conditions, where identified by using the micro array technology and are disclosed in WO 03/000898 A1, WO 02/16655 A, WO 02/22675 A2 and WO 03/008540 A2. It is believed that the identification of these plant genes will be helpful in conferring plants with a selective advantage, for example better propagation, development, growth, survival by increasing the resistance to bacterial or fungal pathogen infection, the herbicidal resistance, insect resistance, environmental or stress resistance and disease resistance. Additionally also the grain composition or quality respectively could be enhanced, for example several limiting amino acids, oil content, starch content, pigmentation, vitamins. Nevertheless, no practical approach of deleting (or knocking out respectively) the genes was made. Accordingly the disclosure refers to the consequence of stress conditions on plants but there is no proof for involvement in plant's stress resistance.

[0013] According to WO 03/020015 A2 an increased salt resistance is exhibited in A. thaliana C24 by deleting or by inactivation (mutagenesis or anti-sense) but also by overexpression of the nced3 gene which encodes for 9-cis-epoxycarotenoid dioxygenase. In contrast to their salt resistance the mutant plants were much more sensitive to soil dessication than wild type plants.

[0014] At the moment many genetical and biotechnological approaches are known in order to obtain plants growing under conditions of low water availability.

[0015] There is still a need to identify genes expressed in stress tolerant plants that have the capacity to confer stress resistance to its host plant and to other plant species, specially to confer increased tolerance and/or resistance to environmental stress, preferably under conditions of water deficiency and confers increased biomass production. It is a object of this invention to identify new methods to confer stress tolerance and/or resistance in plants or plant cells. Complex traits of abiotic stress phenomena make genetic optimisation difficult. However, the modification of a single gene e.g. transcription factors or antiporters resulted in several cases in a significant increase in stress tolerance (Wang et al., 2003).

[0016] It is further a object of this invention to put plants at disposal, which are drought resistant for a period of at least 1.0, preferably 1.5 days of water deficiency as compared to a corresponding non-transformed wild type plant, and exhibit additionally under conditions of low water or desiccation an equal, preferably an increased biomass production.

[0017] Summarized, the present invention relates to a method for producing a transgenic plant with increased tolerance and/or resistance to environmental stress and increased biomass production as compared to a corresponding non-transformed wild type plant, which comprises the following steps:
[0018] a) Reducing, repressing or deleting of one or more activities selected from the group consisting of: 1-phosphatidylinositol 4-kinase, amino acid permease (AAP1), At3g55990-protein, At5g40590-protein, ATP-dependent peptidase/ATPase/nucleoside-triphosphatase/serine-type endopeptidase, DC1 domain-containing protein/protein-binding protein/zinc ion binding protein, DNA binding protein/transcription factor, hydro-lyase/aconitate hydratase, metalloexopeptidase (MAP1C), methyltransferase, nitrate transporter (ATNRT2.3), nitrate/chlorate transporter (NRT1.1), pectate lyase protein/powdery mildew susceptibility protein (PMR6), peptidase/ubiquitin-protein ligase/zinc ion binding protein (JR700), proton-dependent oligopeptide transport protein, transcription factor, and ubiquitin conjugating enzyme/ubiquitin-like activating enzyme., in a plant cell, a plant or a part thereof, and
[0019] b) generating a transformed plant with increased tolerance and/or resistance to environmental stress and increased biomass production as compared to a corresponding non-transformed wild type plant and growing under conditions which permit the development of the plant.

[0020] Further, in another embodiment, the present invention relates to a method for producing a transgenic plant with increased tolerance and/or resistance to environmental stress and increased biomass production as compared to a corresponding non-transformed wild type plant, which comprises the following steps:
[0021] a) reduction, repression or deletion of the activity of
   [0022] (i) a polypeptide comprising a polypeptide, a consensus sequence or at least one polypeptide motif as depicted in column 5 or 7 of Table II or of Table IV, respectively; or
   [0023] (ii) an expression product of a nucleic acid molecule comprising a polynucleotide as depicted in column 5 or 7 of Table I,
   [0024] (iii) or a functional equivalent of (i) or (ii);
[0025] in a plant cell, a plant or a part thereof, and
[0026] b) generating a transformed plant with increased tolerance and/or resistance to environmental stress and increased biomass production as compared to a corresponding non-transformed wild type plant and growing under conditions which permit the development of the plant.

[0027] Preferably, the process of the invention further comprises reducing, decreasing or deleting the expression or activity of at least one nucleic acid molecule having or encoding the activity of at least one nucleic acid molecule represented by the nucleic acid molecule as depicted in column 5 of Table I, and comprising a nucleic acid molecule which is selected from the group consisting of:
[0028] a) an isolated nucleic acid molecule encoding the polypeptide as depicted in column 5 or 7 of Table II;
[0029] b) an isolated nucleic acid molecule as depicted in column 5 or 7 of Table I;
[0030] c) an isolated nucleic acid molecule, which, as a result of the degeneracy of the genetic code, can be derived from a polypeptide sequence as depicted in column 5 or 7 of Table II;
[0031] d) an isolated nucleic acid molecule having at least 30% identity with the nucleic acid molecule sequence of a polynucleotide comprising the nucleic acid molecule as depicted in column 5 or 7 of Table I;
[0032] e) an isolated nucleic acid molecule encoding a polypeptide having at least 30% identity with the amino acid sequence of the polypeptide encoded by the nucleic acid molecule of (a) to (c) and having the activity represented by a nucleic acid molecule comprising a polynucleotide as depicted in column 5 of Table I;
[0033] f) an isolated nucleic acid molecule encoding a polypeptide which can be isolated with the aid of monoclonal or polyclonal antibodies made against a polypeptide encoded by one of the nucleic acid molecules of (a) to (e) and having the activity represented by the nucleic acid molecule comprising a polynucleotide as depicted in column 5 of Table I;
[0034] g) an isolated nucleic acid molecule encoding a polypeptide comprising the consensus sequence or one or more polypeptide motifs as depicted in column 7 of Table IV and preferably having the activity represented by a nucleic acid molecule comprising a polynucleotide as depicted incolumn 5 of Table II or IV;
[0035] h) an isolated nucleic acid molecule encoding a polypeptide having the activity represented by a protein as depicted in column 5 of Table II;
[0036] i) an isolated nucleic acid molecule which comprises a polynucleotide, which is obtained by amplifying a cDNA library or a genomic library using the primers as depicted in column 7 of Table III which do not start at their 5′-end with the nucleotides ATA and preferably having the activity represented by a nucleic acid molecule comprising a polynucleotide as depicted in column 5 of Table II or IV;
[0037] j) an isolated nucleic acid molecule encoding a polypeptide, the polypeptide being derived by substituting, deleting and/or adding one or more amino acids of the amino acid sequence of the polypeptide encoded by the nucleic acid molecules (a) to (d); and
[0038] k) an isolated nucleic acid molecule which is obtainable by screening a suitable nucleic acid library under stringent hybridization conditions with a probe comprising a complementary sequence of a nucleic acid molecule of (a) or (b) or with a fragment thereof, having at least 15 nt, preferably 20 nt, 30 nt, 50 nt, 100 nt, 200 nt or 500 nt of a nucleic acid molecule complementary to a nucleic acid molecule sequence characterized in (a) to (d) and encoding a polypeptide having the activity represented by a protein comprising a polypeptide as depicted in column 5 of Table II;
   or which comprises a sequence which is complementary thereto;

[0039] Preferably, the process of the invention comprises further reducing, repressing, decreasing or deleting of an expression product of a nucleic acid molecule comprising a nucleic acid molecule as depicted in (a) to (j) above, e.g. a polypeptide comprising a polypeptide as depicted in column 5 or 7 of Table II or of a protein encoded by said nucleic acid molecule.

[0040] Preferably, the process of the invention comprises further the reduction of the activity or expression of a polypeptide comprising a polypeptide encoded by the nucleic acid molecule characterized above in a plant or part thereof.

[0041] Preferably, the process of the invention comprises further at least one step selected from the group consisting of:
[0042] a) introducing of a nucleic acid molecule encoding a ribonucleic acid sequence, which is able to form a double-stranded ribonucleic acid molecule, whereby a fragment of at least 17 nt of said double-stranded ribonucleic acid molecule has a homology of at least 50% to a nucleic acid molecule selected from the group of
   [0043] aa) an isolated nucleic acid molecule as characterized above;
   [0044] ab) an isolated nucleic acid molecule as depicted in column 5 or 7 of Table I or encoding a polypeptide as depicted in column 5 or 7 of Table II, and
   [0045] ac) an isolated nucleic acid molecule encoding a polypeptide having the activity of polypeptide depicted in column 5 of Table II or encoding the expression product of a polynucleotide comprising a nucleic acid molecule as depicted in column 5 or 7 of Table I;
[0046] b) introducing an RNAi, snRNA, dsRNA, siRNA, miRNA, ta-siRNA, cosuppression molecule, ribozyme, or antisense nucleic acid molecule, whereby the RNAi, snRNA, dsRNA, siRNA, miRNA, ta-siRNA, cosuppression molecule, ribozyme, or antisense nucleic acid molecule comprises a fragment of at least 17 nt with a homology of at least 50% to a nucleic acid molecule selected from the group defined in section (a) of this claim.
[0047] c) introducing of a ribozyme which specifically cleaves a nucleic acid molecule selected from the group defined in section (a) of this claim;
[0048] d) introducing of the RNAi, snRNA, dsRNA, siRNA, miRNA, ta-siRNA, cosuppression molecule, ribozyme, or antisense nucleic acid molecule characterized in (b) and the ribozyme characterized in (c);
[0049] e) introducing of a sense nucleic acid molecule conferring the expression of a nucleic acid molecule comprising a nucleic acid molecule selected from the group defined herein above or defined in section (ab) or (ac) above or a nucleic acid molecule encoding a polypeptide having at least 50% identity with the amino acid sequence of the polypeptide encoded by the nucleic acid molecule mentioned in section (a) to (c) and having the activity represented by a protein comprising a polypeptide as depicted in column 5 of Table II for inducing a cosuppression of the endogenous expression product;
[0050] f) introducing a nucleic acid molecule conferring the expression of a dominant-negative mutant of a protein having the activity of a protein as depicted in column 5 or 7 of Table II or comprising a polypeptide being encoded by a nucleic acid molecule as characterized herein above;
[0051] g) introducing a nucleic acid molecule encoding a factor, which binds to a nucleic acid molecule comprising a nucleic acid molecule selected from the group defined herein above or defined in section (ab) or (ac) of this claim conferring the expression of a protein having the activity of a protein encoded by a nucleic acid molecule as characterized herein above;
[0052] h) introducing a viral nucleic acid molecule conferring the decline of a RNA molecule comprising a nucleic acid molecule selected from the group defined herein above or defined in section (ab) or (ac) of this claim conferring the expression of a protein encoded by a nucleic acid molecule as characterized herein above;
[0053] i) introducing a nucleic acid construct capable to recombine with and silence, inactivate, repress or reduces the activity of an endogenous gene comprising a nucleic acid molecule selected from the group defined herein above or defined in section (ab) or (ac) of this claim conferring the expression of a protein encoded by a nucleic acid molecule as characterized herein above;
[0054] j) introducing a non-silent mutation in an endogenous gene comprising a nucleic acid molecule selected from the group defined herein above or defined in section (ab) or (ac) of this claim; and
[0055] k) introducing an expression construct conferring the expression of nucleic acid molecule characterized in any one of (a) to (i).

[0056] Preferably, in the process of the invention, a fragment of at least 17 by of a 3′- or 5′-nucleic acid sequence of a sequences comprising a nucleic acid molecule selected from the group defined herein above or defined in section (ab) or (ac) above with an identity of at least 50% is used for the reduction of the nucleic acid molecule characterized above or the polypeptide encoded by said nucleic acid molecule.

[0057] Preferably, in the process of the invention, the reduction or deletion is caused by applying a chemical compound to the non-human-organism.

[0058] Preferably, in the process of the invention, the plant is selected from the group consisting of Anacardiaceae, Asteraceae, Apiaceae, Betulaceae, Boraginaceae, Brassicaceae, Bromeliaceae, Caricaceae, Cannabaceae, Convolvulaceae, Chenopodiaceae, Cucurbitaceae, Elaeagnaceae, Ericaceae, Euphorbiaceae, Fabaceae, Geraniaceae, Gramineae, Juglandaceae, Lauraceae, Leguminosae, Linaceae, perennial grass, fodder crops, vegetables and ornamentals.

[0059] Preferably, the process of the invention further comprises the step, introduction of a RNAi, snRNA, dsRNA, siRNA, miRNA, ta-siRNA, cosuppression molecule, ribozyme, antibody and/or antisense nucleic that has been designed to target the expression product of a gene comprising the nucleic acid molecule as characterized herein above to induce a breakdown of the mRNA of the said gene of interest and thereby silence the gene expression, or of an expression cassette ensuring the expression of the former.

[0060] Further, in another embodiment, the present invention relates to an isolated nucleic acid molecule, which comprises a nucleic acid molecule selected from the group consisting of:
[0061] a) an isolated nucleic acid molecule which encodes a polypeptide comprising the polypeptide as depicted in column 5 or 7 of Table II B or;
[0062] b) an isolated nucleic acid molecule which comprising a polynucleotide as depicted in column 5 or 7 of Table I B or;
[0063] c) an isolated nucleic acid molecule comprising a nucleic acid sequence, which, as a result of the degeneracy of the genetic code, can be derived from a polypeptide sequence as depicted in column 5 or 7 of Table II B and having the activity represented by the protein as depicted in column 5 of Table II;
[0064] d) an isolated nucleic acid molecule encoding a polypeptide having at least 50% identity with the amino acid sequence of a polypeptide encoded by the nucleic acid molecule of (a) or (c) and having the activity represented by the protein as depicted in column 5 of Table II ;
[0065] e) an isolated nucleic acid molecule encoding a polypeptide, which is isolated with the aid of monoclonal antibodies against a polypeptide encoded by one of the nucleic acid molecules of (a) to (c) and having the activity represented by the protein as depicted in column 5 of Table II;
[0066] f) an isolated nucleic acid molecule encoding a polypeptide comprising the consensus sequence or a poylpeptide motif as depicted in column 7 of Table IV and having the biological activity represented by the protein as depicted in column 5 of Table II;
[0067] g) an isolated nucleic acid molecule encoding a polypeptide having the activity represented by a protein as depicted in column 5 of Table II;
[0068] h) an isolated nucleic acid molecule which comprises a polynucleotide, which is obtained by amplifying a cDNA library or a genomic library using the primers as depicted in column 7 of Table III which do not start at their 5′-end with the nucleotides ATA; and
[0069] i) an isolated nucleic acid molecule which is obtainable by screening a suitable library under stringent hybridization conditions with a probe comprising one of the sequences of the nucleic acid molecule of (a) to (c) or with a fragment of at least 17 nt of the nucleic acid molecule characterized in any one of (a) to (h) and encoding a polypeptide having the activity represented by the protein as depicted in column 5 of Table II;
   or which comprises a sequence which is complementary thereto;

[0070] whereby the nucleic acid molecule according to (a) to (i) is at least in one or more nucleotides different from the sequence as depicted in column 5 or 7 of Table I A and preferably which encodes a protein which differs at least in one or more amino acids from the protein sequences as depicted in column 5 or 7 of Table II A.

[0071] Further, in another embodiment, the present invention relates to an RNAi, snRNA, dsRNA, siRNA, miRNA, ta-siRNA, cosuppression molecule, ribozyme, antibody or antisense nucleic acid molecule for the reduction of the activity characterized above or of the activity or expression of a nucleic acid molecule as characterized herein above or a polypeptide encoded by said nucleic acid molecule.

[0072] Preferably, the RNAi, snRNA, dsRNA, siRNA, miRNA, ta-siRNA, cosuppression molecule, ribozyme, or antisense nucleic acid molecule of the invention comprises a fragment of at least 17 nt of the nucleic acid molecule defined herein above.

[0073] Further, in another embodiment, the present invention relates to a double-stranded RNA (dsRNA), RNAi, snRNA, siRNA, miRNA, antisense or to-siRNA molecule or ribozyme, which is able to form a double-stranded ribonucleic acid molecule, whereby a fragment of at least 17 nt of said double-stranded ribonucleic acid molecule has a homology of at least 50% to a nucleic acid molecule selected from the group consisting of
[0074] aa) an isolated nucleic acid molecule as characterized herein above;
[0075] ab) an isolated nucleic acid molecule as depicted in column 5 or 7 of Table I or encoding a polypeptide as depicted in column 5 or 7 of Table II, and
[0076] ac) an isolated nucleic acid molecule encoding a polypeptide having the activity of polypeptide as depicted in column 5 or 7 of Table II or encoding the expression product of a polynucleotide comprising a nucleic acid molecule as depicted in column 5 or 7 of Table I.

[0077] Preferably, in the dsRNA molecule of the invention, the sense strand and the antisense strand are covalently bound to each other and the antisense strand is essentially the complement of the “sense”-RNA strand.

[0078] Further, in another embodiment, the present invention relates to a viral nucleic acid molecule conferring the decline of an RNA molecule conferring the expression of a protein having the activity characterized above or of the activity or expression of a nucleic acid molecule as characterized herein above or a polypeptide encoded by said nucleic acid molecule.

[0079] Further, in another embodiment, the present invention relates to a TILLING primer for the identification of a knock out of a gene comprising a nucleic acid sequence of a nucleic acid molecule as depicted in any one column 5 or 7 of Table I.

[0080] Further, in another embodiment, the present invention relates to a dominant-negative mutant of polypeptide comprising a polypeptide as depicted in column 5 or 7 of Table

[0081] Further, in another embodiment, the present invention relates to a nucleic acid molecute encoding the dominant negative mutant defined above.

[0082] Further, in another embodiment, the present invention relates to a nucleic acid construct conferring the expression of the RNAi, snRNA, dsRNA, siRNA, miRNA, ta-siRNA, cosuppression molecule, ribozyme, antibody or antisense nucleic acid molecule of the invention, the viral nucleic acid molecule of the invention or the nucleic acid molecule of the invention.

[0083] Further, in another embodiment, the present invention relates to a nucleic acid construct comprising the isolated nucleic acid molecule of the invention or the RNAi, snRNA, dsRNA, siRNA, miRNA, ta-siRNA, cosuppression molecule, ribozyme, or antisense nucleic acid molecule of the invention, or the viral nucleic acid molecule of the invention, wherein the nucleic acid molecule is functionally linked to one or more regulatory signals.

[0084] Further, in another embodiment, the present invention relates to a vector comprising the nucleic acid molecule of the invention or the RNAi, snRNA, dsRNA, siRNA, miRNA, ta-siRNA, cosuppression molecule, ribozyme, or antisense nucleic acid molecule of the invention, or the viral nucleic acid molecule of the invention, or the nucleic acid construct of the invention.

[0085] Preferably, in the vector of the invention, the nucleic acid molecule is in operable linkage with regulatory sequences for the expression in a plant host.

[0086] Further, in another embodiment, the present invention relates to a transgenic plant host cell, which has been transformed stably or transiently with the vector of the invention, or the nucleic acid molecule of the invention or the nucleic acid construct of the invention.

[0087] Further, in another embodiment, the present invention relates to a plant cell, a plant or a part thereof, wherein the activity of a protein comprising a polypeptide, a consensus sequence or a polypeptide motif as depicted in column 5 or 7 of Table II, preferably Table II B, or IV or a nucleic acid molecule comprising a nucleic acid molecule as depicted in column 5 or 7 of Table I, preferably Table I B, is reduced.

[0088] Further, in another embodiment, the present invention relates to a process for producing a polypeptide encoded by a nucleic acid sequence of the invention, the polypeptide being expressed in a plant cell, a plant or a part thereof, of the invention.

[0089] Preferably, in the process for producing a polypeptide of the invention or in the host cell of the invention, the host cell is a plant cell selected from the group consisting of Anacardiaceae, Asteraceae, Apiaceae, Betulaceae, Boraginaceae, Brassicaceae, Bromeliaceae, Caricaceae, Cannabaceae, Convolvulaceae, Chenopodiaceae, Cucurbitaceae, Elaeagnaceae, Ericaceae, Euphorbiaceae, Fabaceae, Geraniaceae, Gramineae, Juglandaceae, Lauraceae, Leguminosae, Linaceae, perennial grass, fodder crops, vegetables and ornamentals or is a microorganism as defined above.

[0090] Further, in another embodiment, the present invention relates to an isolated polypeptide encoded by a nucleic acid molecule of the invention or comprising the polypeptide as depicted in column 7 of Table II B.

[0091] Further, in another embodiment, the present invention relates to an antibody, which specifically binds to the polypeptide of the invention.

[0092] Further, in another embodiment, the present invention relates to a plant tissue, plant, harvested plant material or propagation material of a plant comprising the plant cell of the invention.

[0093] Further, in another embodiment, the present invention relates to a method for screening of an antagonist of an activity as characterized in the process of the invention above or being represented by the polypeptide encoded by the nucleic acid molecule characterized for the process of the invention above:
[0094] a) contacting an organism, its cells, tissues or parts, which express the polypeptide with a chemical compound or a sample comprising a plurality of chemical compounds under conditions which permit the reduction or deletion of the expression of the nucleic acid molecule encoding the activity represented by the protein or which permit the reduction or deletion of the activity of the protein;
[0095] b) assaying the level of the activity of the protein or the polypeptide expression level in the plant, its cells, tissues or parts wherein the plant, its cells, tissues or parts is cultured or maintained in; and
[0096] c) identifying an antagonist by comparing the measured level of the activity of the protein or the polypeptide expression level with a standard level of the activity of the protein or the polypeptide expression level measured in the absence of said chemical compound or a sample comprising said plurality of chemical compounds, whereby an decreased level in comparison to the standard indicates that the chemical compound or the sample comprising said plurality of chemical compounds is an antagonist.

[0097] Further, in another embodiment, the present invention relates to a process for the identification of a compound conferring increased tolerance and/or resistance to environmental stress and increased biomass production as compared to a corresponding non-transformed wild type plant in a plant, comprising the steps:
[0098] a) culturing or maintaining a plant, plant cell or their tissues or a part thereof expressing the polypeptide having the activity characterized in the process of the invention above or the polypeptide encoded by the nucleic acid molecule characterized in the process of the invention above or a polynucleotide encoding said polypeptide and a readout system capable of interacting with the polypeptide under suitable conditions which permit the interaction of the polypeptide with this readout system in the presence of a chemical compound or a sample comprising a plurality of chemical compounds and capable of providing a detectable signal in response to the binding of a chemical compound to said polypeptide under conditions which permit the depression of said readout system and of said polypeptide; and
[0099] b) identifying if the chemical compound is an effective antagonist by detecting the presence or absence or decrease or increase of a signal produced by said readout system.

[0100] Further, in another embodiment, the present invention relates to a method for the production of an agricultural composition comprising the steps of the process for the identification of a compound conferring increased tolerance and/or resistance to environmental stress and increased biomass production as compared to a corresponding nontransformed wild type plant in a plant; in a plant cell or part thereof, of the invention and formulating the compound identified said claims in a form acceptable for an application in agriculture.

[0101] Further, in another embodiment, the present invention relates to a composition comprising the protein of the invention, the nucleic acid molecule of the invention, the nucleic acid construct of the invention, the vector of the invention, the antagonist identified according to the method for identification of an antagonist of the invention, the antibody of the invention, the host cell of the invention, the nucleic acid molecule characterized in the process of the invention, the RNAi, snRNA, dsRNA, siRNA, miRNA, ta-siRNA, cosuppression molecule, ribozyme, or antisense nucleic acid molecule of the invention and optionally a agricultural acceptable carrier.

[0102] Further, in another embodiment, the present invention relates to a food or feed comprising the protein of the invention, the nucleic acid molecule of the invention, the nucleic acid construct of the invention, the vector of the invention, the antagonist identified according to the method for identification of an antagonist of the invention, the antibody of the invention, the host cell of the invention, the nucleic acid molecule characterized in the process of the invention, the RNAi, snRNA, dsRNA, siRNA, miRNA, ta-siRNA, cosuppression molecule, ribozyme, or antisense nucleic acid molecule of the invention, the plant, plant tissue, the harvested plant material or propagation material of a plant of the invention.

[0103] Further, in another embodiment, the present invention relates to use of the protein of the invention, the nucleic acid molecule of the invention, the nucleic acid construct of the invention, the vector of the invention, the antagonist identified according to the method for identification of an antagonist of the invention, the antibody of the invention, the host cell of the invention, the nucleic acid molecule characterized in the process of the invention, the RNAi, snRNA, dsRNA, siRNA, miRNA, ta-siRNA, cosuppression molecule, ribozyme, or antisense nucleic acid molecule of the invention, for producing a transgenic plant with increased tolerance and/or resistance to environmental stress and increased biomass production as compared to a corresponding non-transformed wild type plant.

[0104] Table I shows the SEQ ID NOs. of relevant polynucleotides. Table II shows the SEQ ID NOs. of relevant polypeptides. Table IV shows the SEQ ID NOs. of relevant consensus sequences and relevant polypeptide motifs. In all these tables the abbreviation “A. th.” was used for the organism “Arabidopsis thaliana”.

[0105] In the following, the term “polypeptide as depicted in Table II or IV” also relates to a polypeptide comprising the consensus sequence or at least one polypeptide motif as depicted in Table IV.

[0106] The molecule which activity is to be reduced according to the process of the invention to provide the increase of tolerance and/or resistance to environmental stress and increased biomass production as compared to a corresponding non-transformed wild type plant, e.g. the molecule of I. and/or II. above, is in the following the molecule “which activity is to be reduced in the process of the invention”. The molecule can for example be a polypeptide or a nucleic acid molecule.

[0107] Accordingly, in other words, the invention relates to a method for producing a transgenic plant with increased tolerance and/or resistance to environmental stress and increased biomass production as compared to a corresponding non-transformed wild type plant, which comprises the following steps:
[0108] a) reduction, repression or deletion of the activity of
   [0109] I) at least one polypeptide comprising a polypeptide selected from the group consisting of SEQ ID NOs 28, 105, 191, 411, 513, 674, 730, 814, 924, 1026, 1084, 1386, 1419, 1465, 1552, 1594, and 1651 or a homologue thereof as depicted in column 7 of Table II, preferably as depicted in Table II B, or comprising, a consensus sequence or at least one polypeptide motif of Table IV, Or
   [0110] II) at least one expression product of a nucleic acid molecule comprising a polynucleotide selected from the group consisting of SEQ ID NOs 27, 104, 190, 410, 512, 673, 729, 813, 923, 1025, 1083, 1385, 1418, 1464, 1551, 1593, and 1650 or a homologue thereof as depicted in column 7 of Table I, preferably as depicted in in column 5 or 7 of Table I B,
   [0111] III) or a functional equivalent of (I) or (II)
   [0112] in a plant or a part thereof; and
[0113] b) generating a transformed plant with increased tolerance and/or resistance to environmental stress and increased biomass production as compared to a corresponding non-transformed wild type plant and growing under conditions which permit the development of the plant.

[0114] In one embodiment the invention relates to a method for producing a transgenic plant with increased tolerance and/or resistance to environmental stress and increased biomass production as compared to a corresponding non-transformed wild type plant, which comprises the following steps:
[0115] a) reduction, repression or deletion of the activity of
   [0116] I) at least one polypeptide comprising a polypeptide selected from the group consisting of SEQ ID NOs 28, 105, 191, 411, 513, 674, 730, 814, 924, 1026, 1084, 1386, 1419, 1465, 1552, 1594, and 1651 or a homologue thereof as depicted in column 7 of Table II, preferably as depicted in Table II B, or comprising, a consensus sequence or at least one polypeptide motif of Table IV, or
   [0117] II) at least one expression product of a nucleic acid molecule comprising a polynucleotide selected from the group consisting of SEQ ID NOs 27, 104, 190, 410, 512, 673, 729, 813, 923, 1025, 1083, 1385, 1418, 1464, 1551, 1593, and 1650 or a homologue thereof as depicted in column 7 of Table I, preferably as depicted in in column 5 or 7 of Table I B,
   [0118] III) or a functional equivalent of (I) or (II)
   [0119] in a plant or a part thereof; and
[0120] b) generating a transformed plant with increased tolerance and/or resistance to environmental stress and increased biomass production as compared to a corresponding non-transformed wild type plant and growing under conditions which permit the development of the plant,
[0121] c) imposing drought by withholding water,
[0122] d) after the non-transformed wild type plants show visual symptoms of injury selecting the plant with increased tolerance and/or resistance to environmental stress and increased biomass production as compared to a corresponding non-transformed wild type plant.

[0123] Surprisingly, it was observed that a knock out of at least one gene conferring an activity selected from the group consisting of: 1-phosphatidylinositol 4-kinase, amino acid permease (AAP1), At3g55990-protein, At5g40590-protein, ATP-dependent peptidase/ATPase/nucleoside-triphosphatase/serine-type endopeptidase, DC1 domain-containing protein/protein-binding protein/zinc ion binding protein, DNA binding protein/transcription factor, hydro-lyase/aconitate hydratase, metalloexopeptidase (MAP1C), methyltransferase, nitrate transporter (ATNRT2.3), nitrate/chlorate transporter (NRT1.1), pectate lyase protein/powdery mildew susceptibility protein (PMR6), peptidase/ubiquitin-protein ligase/zinc ion binding protein (JR700), proton-dependent oligopeptide transport protein, transcription factor, and ubiquitin conjugating enzyme/ubiquitin-like activating enzyme or of a gene comprising a nucleic acid sequence described in column 5 of Table I in Arabidopsis thaliana conferred an increase in tolerance and/or resistance to environmental stress and increased biomass production as compared to a corresponding non-transformed wild type plant in the transformed plants.

[0124] In particular, it was observed that the knock out of a gene comprising the nucleic acid sequence SEQ ID NO.: 1418 in Arabidopsis thaliana conferred an increased drought resistance by surviving longer than the wild type control without showing any symptoms of injury for a period between 2.7 and 5 days as shown in the Examples, table 1. It was further observed that reducing the activity of a gene product with the activity of a “ubiquitin conjugating enzyme/ubiquitin-like activating enzyme” encoded by a gene comprising the nucleic acid sequence SEQ ID NO.: 1418 in Arabidopsis thaliana conferred an increased biomass production compared with the wild type control without showing any symptoms of injury for a period between 0.6 and 2 days as shown in the Examples.

[0125] In particular, it was observed that the knock out of a gene comprising the nucleic acid sequence SEQ ID NO.: 1025 in Arabidopsis thaliana conferred an increased drought resistance by surviving longer than the wild type control without showing any symptoms of injury for a period between 4.7 and 5 days as shown in the Examples, table 1. It was further observed that reducing the activity of a gene product with the activity of a “methyltransferase” encoded by a gene comprising the nucleic acid sequence SEQ ID NO.: 1025 in Arabidopsis thaliana conferred an increased biomass production compared with the wild type control without showing any symptoms of injury for a period between 0.5 and 5 days as shown in the Examples.

[0126] In particular, it was observed that the knock out of a gene comprising the nucleic acid sequence SEQ ID NO.: 729 in Arabidopsis thaliana conferred an increased drought resistance by surviving longer than the wild type control without showing any symptoms of injury for a period between 1.8 and 4 days as shown in the Examples, table 1. It was further observed that reducing the activity of a gene product with the activity of a “transcription factor” encoded by a gene comprising the nucleic acid sequence SEQ ID NO.: 729 in Arabidopsis thaliana conferred an increased biomass production compared with the wild type control without showing any symptoms of injury for a period between 1.2 and 3 days as shown in the Examples.

[0127] In particular, it was observed that the knock out of a gene comprising the nucleic acid sequence SEQ ID NO.: 27 in Arabidopsis thaliana conferred an increased drought resistance by surviving longer than the wild type control without showing any symptoms of injury for a period between 3 and 5 days as shown in the Examples, table 1. It was further observed that reducing the activity of a gene product with the activity of a “nitrate/chlorate transporter (NRT1.1)” encoded by a gene comprising the nucleic acid sequence SEQ ID NO.: 27 in Arabidopsis thaliana conferred an increased biomass production compared with the wild type control without showing any symptoms of injury for a period between 1.8 and 3 days as shown in the Examples.

[0128] In particular, it was observed that the knock out of a gene comprising the nucleic acid sequence SEQ ID NO.: 104 in Arabidopsis thaliana conferred an increased drought resistance by surviving longer than the wild type control without showing any symptoms of injury for a period between 2.9 and 5 days as shown in the Examples, table 1. It was further observed that reducing the activity of a gene product with the activity of a “metalloexopeptidase (MAP1 C)” encoded by a gene comprising the nucleic acid sequence SEQ ID NO.: 104 in Arabidopsis thaliana conferred an increased biomass production compared with the wild type control without showing any symptoms of injury for a period between 1.4 and 3 days as shown in the Examples.

[0129] In particular, it was observed that the knock out of a gene comprising the nucleic acid sequence SEQ ID NO.: 190 in Arabidopsis thaliana conferred an increased drought resistance by surviving longer than the wild type control without showing any symptoms of injury for a period between 2.9 and 5 days as shown in the Examples, table 1. It was further observed that reducing the activity of a gene product with the activity of a “proton-dependent oligopeptide transport protein” encoded by a gene comprising the nucleic acid sequence SEQ ID NO.: 190 in Arabidopsis thaliana conferred an increased biomass production compared with the wild type control without showing any symptoms of injury for a period between 1.3 and 2 days as shown in the Examples.

[0130] In particular, it was observed that the knock out of a gene comprising the nucleic acid sequence SEQ ID NO.: 512 in Arabidopsis thaliana conferred an increased drought resistance by surviving longer than the wild type control without showing any symptoms of injury for a period between 2.5 and 4 days as shown in the Examples, table 1. It was further observed that reducing the activity of a gene product with the activity of a “amino acid permease (AAP1)” encoded by a gene comprising the nucleic acid sequence SEQ ID NO.: 512 in Arabidopsis thaliana conferred an increased biomass production compared with the wild type control without showing any symptoms of injury for a period between 1 and 2 days as shown in the Examples.

[0131] In particular, it was observed that the knock out of a gene comprising the nucleic acid sequence SEQ ID NO.: 1464 in Arabidopsis thaliana conferred an increased drought resistance by surviving longer than the wild type control without showing any symptoms of injury for a period between 2.4 and 5 days as shown in the Examples, table 1. It was further observed that reducing the activity of a gene product with the activity of a “nitrate transporter (ATNRT2.3)” encoded by a gene comprising the nucleic acid sequence SEQ ID NO.: 1464 in Arabidopsis thaliana conferred an increased biomass production compared with the wild type control without showing any symptoms of injury for a period between 1.3 and 3 days as shown in the Examples.

[0132] In particular, it was observed that the knock out of a gene comprising the nucleic acid sequence SEQ ID NO.: 813 in Arabidopsis thaliana conferred an increased drought resistance by surviving longer than the wild type control without showing any symptoms of injury for a period between 2.7 and 4 days as shown in the Examples, table 1. It was further observed that reducing the activity of a gene product with the activity of a “pectate lyase protein/powdery mildew susceptibility protein (PMR6)” encoded by a gene comprising the nucleic acid sequence SEQ ID NO.: 813 in Arabidopsis thaliana conferred an increased biomass production compared with the wild type control without showing any symptoms of injury for a period between 1 and 3 days as shown in the Examples.

[0133] In particular, it was observed that the knock out of a gene comprising the nucleic acid sequence SEQ ID NO.: 673 in Arabidopsis thaliana conferred an increased drought resistance by surviving longer than the wild type control without showing any symptoms of injury for a period between 2.8 and 5 days as shown in the Examples, table 1. It was further observed that reducing the activity of a gene product with the activity of a “ATP-dependent peptidase/ATPase/nucleoside-triphosphatase/serine-type endopeptidase” encoded by a gene comprising the nucleic acid sequence SEQ ID NO.: 673 in Arabidopsis thaliana conferred an increased biomass production compared with the wild type control without showing any symptoms of injury for a period between 1.5 and 4 days as shown in the Examples.

[0134] In particular, it was observed that the knock out of a gene comprising the nucleic acid sequence SEQ ID NO.: 27 in Arabidopsis thaliana conferred an increased drought resistance by surviving longer than the wild type control without showing any symptoms of injury for a period between 2.7 and 5 days as shown in the Examples, table 1. It was further observed that reducing the activity of a gene product with the activity of a “nitrate/chlorate transporter (NRT1.1)” encoded by a gene comprising the nucleic acid sequence SEQ ID NO.: 27 in Arabidopsis thaliana conferred an increased biomass production compared with the wild type control without showing any symptoms of injury for a period between 1.7 and 4 days as shown in the Examples.

[0135] In particular, it was observed that the knock out of a gene comprising the nucleic acid sequence SEQ ID NO.: 512 in Arabidopsis thaliana conferred an increased drought resistance by surviving longer than the wild type control without showing any symptoms of injury for a period between 2.9 and 5 days as shown in the Examples, table 1. It was further observed that reducing the activity of a gene product with the activity of a “amino acid permease (AAP1)” encoded by a gene comprising the nucleic acid sequence SEQ ID NO.: 512 in Arabidopsis thaliana conferred an increased biomass production compared with the wild type control without showing any symptoms of injury for a period between 1.4 and 2 days as shown in the Examples.

[0136] In particular, it was observed that the knock out of a gene comprising the nucleic acid sequence SEQ ID NO.: 1385 in Arabidopsis thaliana conferred an increased drought resistance by surviving longer than the wild type control without showing any symptoms of injury for a period between 2.5 and 5 days as shown in the Examples, table 1. It was further observed that reducing the activity of a gene product with the activity of a “At5g40590-protein” encoded by a gene comprising the nucleic acid sequence SEQ ID NO.: 1385 in Arabidopsis thaliana conferred an increased biomass production compared with the wild type control without showing any symptoms of injury for a period between 0.9 and 2 days as shown in the Examples.

[0137] Further, it was observed that the knock out of a gene comprising the nucleic acid sequence SEQ ID NO.: 1385 in Arabidopsis thaliana conferred an increased cold resistance”, particulary low temperature tolerance, by increasing the biomass production under low temperature conditions compared with the wild type control for 5% to 100% or even more, preferably 10% to 50%, 15% to 40%, more preferably 20% to 30%, 22% to 25%, 23% as shown in the Examples.

[0138] In particular, it was observed that the knock out of a gene comprising the nucleic acid sequence SEQ ID NO.: 410 in Arabidopsis thaliana conferred an increased drought resistance by surviving longer than the wild type control without showing any symptoms of injury for a period between 2.7 and 5 days as shown in the Examples, table 1. It was further observed that reducing the activity of a gene product with the activity of a “DNA binding protein/transcription factor” encoded by a gene comprising the nucleic acid sequence SEQ ID NO.: 410 in Arabidopsis thaliana conferred an increased biomass production compared with the wild type control without showing any symptoms of injury for a period between 1.2 and 4 days as shown in the Examples.

[0139] In particular, it was observed that the knock out of a gene comprising the nucleic acid sequence SEQ ID NO.: 923 in Arabidopsis thaliana conferred an increased drought resistance by surviving longer than the wild type control without showing any symptoms of injury for a period between 2.5 and 5 days as shown in the Examples, table 1. It was further observed that reducing the activity of a gene product with the activity of a “hydro-lyase/aconitate hydratase” encoded by a gene comprising the nucleic acid sequence SEQ ID NO.: 923 in Arabidopsis thaliana conferred an increased biomass production compared with the wild type control without showing any symptoms of injury for a period between 1.3 and 4 days as shown in the Examples.

[0140] In particular, it was observed that the knock out of a gene comprising the nucleic acid sequence SEQ ID NO.: 1593 in Arabidopsis thaliana conferred an increased drought resistance by surviving longer than the wild type control without showing any symptoms of injury for a period between 4 and 5 days as shown in the Examples, table 1. It was further observed that reducing the activity of a gene product with the activity of a “peptidase/ubiquitin-protein ligase/zinc ion binding protein (JR700)” encoded by a gene comprising the nucleic acid sequence SEQ ID NO.: 1593 in Arabidopsis thaliana conferred an increased biomass production compared with the wild type control without showing any symptoms of injury for a period between 0.1 and 0.1 days as shown in the Examples.

[0141] In particular, it was observed that the knock out of a gene comprising the nucleic acid sequence SEQ ID NO.: 1083 in Arabidopsis thaliana conferred an increased drought resistance by surviving longer than the wild type control without showing any symptoms of injury for a period between 2.2 and 4 days as shown in the Examples, table 1. It was further observed that reducing the activity of a gene product with the activity of a “DC1 domain-containing protein/protein-binding protein/zinc ion binding protein” encoded by a gene comprising the nucleic acid sequence SEQ ID NO.: 1083 in Arabidopsis thaliana conferred an increased biomass production compared with the wild type control without showing any symptoms of injury for a period between 1 and 3 days as shown in the Examples.

[0142] In particular, it was observed that the knock out of a gene comprising the nucleic acid sequence SEQ ID NO.: 1551 in Arabidopsis thaliana conferred an increased drought resistance by surviving longer than the wild type control without showing any symptoms of injury for a period between 2.3 and 4 days as shown in the Examples, table 1. It was further observed that reducing the activity of a gene product with the activity of a “1-phosphatidylinositol 4-kinase” encoded by a gene comprising the nucleic acid sequence SEQ ID NO.: 1551 in Arabidopsis thaliana conferred an increased biomass production compared with the wild type control without showing any symptoms of injury for a period between 0.7 and 2 days as shown in the Examples.

[0143] In particular, it was observed that the knock out of a gene comprising the nucleic acid sequence SEQ ID NO.: 1650 in Arabidopsis thaliana conferred an increased drought resistance by surviving longer than the wild type control without showing any symptoms of injury for a period between 4.5 and 5 days as shown in the Examples, table 1. It was further observed that reducing the activity of a gene product with the activity of a “At3g55990-protein” encoded by a gene comprising the nucleic acid sequence SEQ ID NO.: 1650 in Arabidopsis thaliana conferred an increased biomass production compared with the wild type control without showing any symptoms of injury for a period between 2.2 and 4 days as shown in the Examples.

[0144] Thus, according to the method of the invention for an increased tolerance and/or resistance to environmental stress and increased biomass production in a plant cell, plant or a part thereof compared to a control or wild type can be achieved.

[0145] Accordingly, in one embodiment, in case the activity of the A. thaliana nucleic acid molecule or a polypeptide comprising the nucleic acid SEQ ID NO.: 1418 or polypeptide SEQ ID NO.: 1419, respectively is reduced or in case in an other organism the activity of the native homolog of said nucleic acid molecule or polypeptide is reduced, e.g. if the activity of a nucleic acid molecule or a polypeptide comprising the nucleic acid or polypeptide or the consensus sequence or the polypeptide motif, as depicted in Table I, II or IV, column 7 in the respective same line as the nucleic acid molecule SEQ ID NO.: 1418 or polypeptide SEQ ID NO.: 1419, respectively is reduced or if the activity “ubiquitin conjugating enzyme/ubiquitin-like activating enzyme” is reduced in a plant cell, a plant or a part thereof, preferably

[0146] an increased drought resistance by surviving longer than the wild type control without showing any symptoms of injury for a period between 2.7 and 5 days or more and an increased biomass production compared with the wild type control without showing any symptoms of injury for a period between 0.6 and 2 days is conferred.

[0147] Accordingly, in one embodiment, in case the activity of the A. thaliana nucleic acid molecule or a polypeptide comprising the nucleic acid SEQ ID NO.: 1025 or polypeptide SEQ ID NO.: 1026, respectively is reduced or in case in an other organism the activity of the native homolog of said nucleic acid molecule or polypeptide is reduced, e.g. if the activity of a nucleic acid molecule or a polypeptide comprising the nucleic acid or polypeptide or the consensus sequence or the polypeptide motif, as depicted in Table I, II or IV, column 7 in the respective same line as the nucleic acid molecule SEQ ID NO.: 1025 or polypeptide SEQ ID NO.: 1026, respectively is reduced or if the activity “methyltransferase” is reduced in a plant cell, a plant or a part thereof, preferably an increased drought resistance by surviving longer than the wild type control without showing any symptoms of injury for a period between 4.7 and 5 days or more and an increased biomass production compared with the wild type control without showing any symptoms of injury for a period between 0.5 and 5 days is conferred.

[0148] Accordingly, in one embodiment, in case the activity of the A. thaliana nucleic acid molecule or a polypeptide comprising the nucleic acid SEQ ID NO.: 729 or polypeptide SEQ ID NO.: 730, respectively is reduced or in case in an other organism the activity of the native homolog of said nucleic acid molecule or polypeptide is reduced, e.g. if the activity of a nucleic acid molecule or a polypeptide comprising the nucleic acid or polypeptide or the consensus sequence or the polypeptide motif, as depicted in Table I, II or IV, column 7 in the respective same line as the nucleic acid molecule SEQ ID NO.: 729 or polypeptide SEQ ID NO.: 730, respectively is reduced or if the activity “transcription factor” is reduced in a plant cell, a plant or a part thereof, preferably an increased drought resistance by surviving longer than the wild type control without showing any symptoms of injury for a period between 1.8 and 4 days or more and an increased biomass production compared with the wild type control without showing any symptoms of injury for a period between 1.2 and 3 days is conferred.

[0149] Accordingly, in one embodiment, in case the activity of the A. thaliana nucleic acid molecule or a polypeptide comprising the nucleic acid SEQ ID NO.: 27 or polypeptide SEQ ID NO.: 28, respectively is reduced or in case in an other organism the activity of the native homolog of said nucleic acid molecule or polypeptide is reduced, e.g. if the activity of a nucleic acid molecule or a polypeptide comprising the nucleic acid or polypeptide or the consensus sequence or the polypeptide motif, as depicted in Table I, II or IV, column 7 in the respective same line as the nucleic acid molecule SEQ ID NO.: 27 or polypeptide SEQ ID NO.: 28, respectively is reduced or if the activity “nitrate/chlorate transporter (NRT1.1)” is reduced in a plant cell, a plant or a part thereof, preferably an increased drought resistance by surviving longer than the wild type control without showing any symptoms of injury for a period between 3 and 5 days or more and an increased biomass production compared with the wild type control without showing any symptoms of injury for a period between 1.8 and 3 days is conferred.

[0150] Accordingly, in one embodiment, in case the activity of the A. thaliana nucleic acid molecule or a polypeptide comprising the nucleic acid SEQ ID NO.: 104 or polypeptide SEQ ID NO.: 105, respectively is reduced or in case in an other organism the activity of the native homolog of said nucleic acid molecule or polypeptide is reduced, e.g. if the activity of a nucleic acid molecule or a polypeptide comprising the nucleic acid or polypeptide or the consensus sequence or the polypeptide motif, as depicted in Table I, II or IV, column 7 in the respective same line as the nucleic acid molecule SEQ ID NO.: 104 or polypeptide SEQ ID NO.: 105, respectively is reduced or if the activity “metalloexopeptidase (MAP1C)” is reduced in a plant cell, a plant or a part thereof, preferably an increased drought resistance by surviving longer than the wild type control without showing any symptoms of injury for a period between 2.9 and 5 days or more and an increased biomass production compared with the wild type control without showing any symptoms of injury for a period between 1.4 and 3 days is conferred.

[0151] Accordingly, in one embodiment, in case the activity of the A. thaliana nucleic acid molecule or a polypeptide comprising the nucleic acid SEQ ID NO.: 190 or polypeptide SEQ ID NO.: 191, respectively is reduced or in case in an other organism the activity of the native homolog of said nucleic acid molecule or polypeptide is reduced, e.g. if the activity of a nucleic acid molecule or a polypeptide comprising the nucleic acid or polypeptide or the consensus sequence or the polypeptide motif, as depicted in Table I, II or IV, column 7 in the respective same line as the nucleic acid molecule SEQ ID NO.: 190 or polypeptide SEQ ID NO.: 191, respectively is reduced or if the activity “proton-dependent oligopeptide transport protein” is reduced in a plant cell, a plant or a part thereof, preferably

[0152] an increased drought resistance by surviving longer than the wild type control without showing any symptoms of injury for a period between 2.9 and 5 days or more and an increased biomass production compared with the wild type control without showing any symptoms of injury for a period between 1.3 and 2 days is conferred.

[0153] Accordingly, in one embodiment, in case the activity of the A. thaliana nucleic acid molecule or a polypeptide comprising the nucleic acid SEQ ID NO.: 512 or polypeptide SEQ ID NO.: 513, respectively is reduced or in case in an other organism the activity of the native homolog of said nucleic acid molecule or polypeptide is reduced, e.g. if the activity of a nucleic acid molecule or a polypeptide comprising the nucleic acid or polypeptide or the consensus sequence or the polypeptide motif, as depicted in Table I, II or IV, column 7 in the respective same line as the nucleic acid molecule SEQ ID NO.: 512 or polypeptide SEQ ID NO.: 513, respectively is reduced or if the activity “amino acid permease (AAP1)” is reduced in a plant cell, a plant or a part thereof, preferably an increased drought resistance by surviving longer than the wild type control without showing any symptoms of injury for a period between 2.5 and 4 days or more and an increased biomass production compared with the wild type control without showing any symptoms of injury for a period between 1 and 2 days is conferred.

[0154] Accordingly, in one embodiment, in case the activity of the A. thaliana nucleic acid molecule or a polypeptide comprising the nucleic acid SEQ ID NO.: 1464 or polypeptide SEQ ID NO.: 1465, respectively is reduced or in case in an other organism the activity of the native homolog of said nucleic acid molecule or polypeptide is reduced, e.g. if the activity of a nucleic acid molecule or a polypeptide comprising the nucleic acid or polypeptide or the consensus sequence or the polypeptide motif, as depicted in Table I, II or IV, column 7 in the respective same line as the nucleic acid molecule SEQ ID NO.: 1464 or polypeptide SEQ ID NO.: 1465, respectively is reduced or if the activity “nitrate transporter (ATNRT2.3)” is reduced in a plant cell, a plant or a part thereof, preferably an increased drought resistance by surviving longer than the wild type control without showing any symptoms of injury for a period between 2.4 and 5 days or more and an increased biomass production compared with the wild type control without showing any symptoms of injury for a period between 1.3 and 3 days is conferred.

[0155] Accordingly, in one embodiment, in case the activity of the A. thaliana nucleic acid molecule or a polypeptide comprising the nucleic acid SEQ ID NO.: 813 or polypeptide SEQ ID NO.: 814, respectively is reduced or in case in an other organism the activity of the native homolog of said nucleic acid molecule or polypeptide is reduced, e.g. if the activity of a nucleic acid molecule or a polypeptide comprising the nucleic acid or polypeptide or the consensus sequence or the polypeptide motif, as depicted in Table I, II or IV, column 7 in the respective same line as the nucleic acid molecule SEQ ID NO.: 813 or polypeptide SEQ ID NO.: 814, respectively is reduced or if the activity “pectate lyase protein/powdery mildew susceptibility protein (PMR6)” is reduced in a plant cell, a plant or a part thereof, preferably

[0156] an increased drought resistance by surviving longer than the wild type control without showing any symptoms of injury for a period between 2.7 and 4 days or more and an increased biomass production compared with the wild type control without showing any symptoms of injury for a period between 1 and 3 days is conferred.

[0157] Accordingly, in one embodiment, in case the activity of the A. thaliana nucleic acid molecule or a polypeptide comprising the nucleic acid SEQ ID NO.: 673 or polypeptide SEQ ID NO.: 674, respectively is reduced or in case in an other organism the activity of the native homolog of said nucleic acid molecule or polypeptide is reduced, e.g. if the activity of a nucleic acid molecule or a polypeptide comprising the nucleic acid or polypeptide or the consensus sequence or the polypeptide motif, as depicted in Table I, II or IV, column 7 in the respective same line as the nucleic acid molecule SEQ ID NO.: 673 or polypeptide SEQ ID NO.: 674, respectively is reduced or if the activity “ATP-dependent peptidase/ATPase/nucleoside-triphosphatase/serine-type endopeptidase” is reduced in a plant cell, a plant or a part thereof, preferably an increased drought resistance by surviving longer than the wild type control without showing any symptoms of injury for a period between 2.8 and 5 days or more and an increased biomass production compared with the wild type control without showing any symptoms of injury for a period between 1.5 and 4 days is conferred.

[0158] Accordingly, in one embodiment, in case the activity of the A. thaliana nucleic acid molecule or a polypeptide comprising the nucleic acid SEQ ID NO.: 27 or polypeptide SEQ ID NO.: 28, respectively is reduced or in case in an other organism the activity of the native homolog of said nucleic acid molecule or polypeptide is reduced, e.g. if the activity of a nucleic acid molecule or a polypeptide comprising the nucleic acid or polypeptide or the consensus sequence or the polypeptide motif, as depicted in Table I, II or IV, column 7 in the respective same line as the nucleic acid molecule SEQ ID NO.: 27 or polypeptide SEQ ID NO.: 28, respectively is reduced or if the activity “nitrate/chlorate transporter (NRT1.1)” is reduced in a plant cell, a plant or a part thereof, preferably an increased drought resistance by surviving longer than the wild type control without showing any symptoms of injury for a period between 2.7 and 5 days or more and an increased biomass production compared with the wild type control without showing any symptoms of injury for a period between 1.7 and 4 days is conferred.

[0159] Accordingly, in one embodiment, in case the activity of the A. thaliana nucleic acid molecule or a polypeptide comprising the nucleic acid SEQ ID NO.: 512 or polypeptide SEQ ID NO.: 513, respectively is reduced or in case in an other organism the activity of the native homolog of said nucleic acid molecule or polypeptide is reduced, e.g. if the activity of a nucleic acid molecule or a polypeptide comprising the nucleic acid or polypeptide or the consensus sequence or the polypeptide motif, as depicted in Table I, II or IV, column 7 in the respective same line as the nucleic acid molecule SEQ ID NO.: 512 or polypeptide SEQ ID NO.: 513, respectively is reduced or if the activity “amino acid permease (AAP1)” is reduced in a plant cell, a plant or a part thereof, preferably an increased drought resistance by surviving longer than the wild type control without showing any symptoms of injury for a period between 2.9 and 5 days or more and an increased biomass production compared with the wild type control without showing any symptoms of injury for a period between 1.4 and 2 days is conferred.

[0160] Accordingly, in one embodiment, in case the activity of the A. thaliana nucleic acid molecule or a polypeptide comprising the nucleic acid SEQ ID NO.: 1385 or polypeptide SEQ ID NO.: 1386, respectively is reduced or in case in an other organism the activity of the native homolog of said nucleic acid molecule or polypeptide is reduced, e.g. if the activity of a nucleic acid molecule or a polypeptide comprising the nucleic acid or polypeptide or the consensus sequence or the polypeptide motif, as depicted in Table I, II or IV, column 7 in the respective same line as the nucleic acid molecule SEQ ID NO.: 1385 or polypeptide SEQ ID NO.: 1386, respectively is reduced or if the activity “At5g40590-protein” is reduced in a plant cell, a plant or a part thereof, preferably an increased drought resistance by surviving longer than the wild type control without showing any symptoms of injury for a period between 2.5 and 5 days or more and an increased biomass production compared with the wild type control without showing any symptoms of injury for a period between 0.9 and 2 days is conferred. Accordingly, in one embodiment, in case the activity of the A. thaliana nucleic acid molecule or a polypeptide comprising the nucleic acid SEQ ID NO.: 1385 or polypeptide SEQ ID NO.: 1386, respectively is reduced or in case in an other organism the activity of the native homolog of said nucleic acid molecule or polypeptide is reduced, e.g. if the activity of a nucleic acid molecule or a polypeptide comprising the nucleic acid or polypeptide or the consensus sequence or the polypeptide motif, as depicted in Table I, II or IV, column 7 in the respective same line as the nucleic acid molecule SEQ ID NO.: 1385 or polypeptide SEQ ID NO.: 1386, respectively is reduced or if the activity “At5g40590-protein” is reduced in a plant cell, a plant or a part thereof, preferably an increased biomass production under low temperature conditions compared with the wild type control for 5% to 100% or even more, preferably 10% to 50%, 15% to 40%, more preferably 20% to 30%, 22% to 25%, 23% is conferred.

[0161] Accordingly, in one embodiment, in case the activity of the A. thaliana nucleic acid molecule or a polypeptide comprising the nucleic acid SEQ ID NO.: 410 or polypeptide SEQ ID NO.: 411, respectively is reduced or in case in an other organism the activity of the native homolog of said nucleic acid molecule or polypeptide is reduced, e.g. if the activity of a nucleic acid molecule or a polypeptide comprising the nucleic acid or polypeptide or the consensus sequence or the polypeptide motif, as depicted in Table I, II or IV, column 7 in the respective same line as the nucleic acid molecule SEQ ID NO.: 410 or polypeptide SEQ ID NO.: 411, respectively is reduced or if the activity “DNA binding protein/transcription factor” is reduced in a plant cell, a plant or a part thereof, preferably

[0162] an increased drought resistance by surviving longer than the wild type control without showing any symptoms of injury for a period between 2.7 and 5 days or more and an increased biomass production compared with the wild type control without showing any symptoms of injury for a period between 1.2 and 4 days is conferred. Accordingly, in one embodiment, in case the activity of the A. thaliana nucleic acid molecule or a polypeptide comprising the nucleic acid SEQ ID NO.: 923 or polypeptide SEQ ID NO.: 924, respectively is reduced or in case in an other organism the activity of the native homolog of said nucleic acid molecule or polypeptide is reduced, e.g. if the activity of a nucleic acid molecule or a polypeptide comprising the nucleic acid or polypeptide or the consensus sequence or the polypeptide motif, as depicted in Table I, II or IV, column 7 in the respective same line as the nucleic acid molecule SEQ ID NO.: 923 or polypeptide SEQ ID NO.: 924, respectively is reduced or if the activity “hydrolyase/aconitate hydratase” is reduced in a plant cell, a plant or a part thereof, preferably

[0163] an increased drought resistance by surviving longer than the wild type control without showing any symptoms of injury for a period between 2.5 and 5 days or more and an increased biomass production compared with the wild type control without showing any symptoms of injury for a period between 1.3 and 4 days is conferred.

[0164] Accordingly, in one embodiment, in case the activity of the A. thaliana nucleic acid molecule or a polypeptide comprising the nucleic acid SEQ ID NO.: 1593 or polypeptide SEQ ID NO.: 1594, respectively is reduced or in case in an other organism the activity of the native homolog of said nucleic acid molecule or polypeptide is reduced, e.g. if the activity of a nucleic acid molecule or a polypeptide comprising the nucleic acid or polypeptide or the consensus sequence or the polypeptide motif, as depicted in Table I, II or IV, column 7 in the respective same line as the nucleic acid molecule SEQ ID NO.: 1593 or polypeptide SEQ ID NO.: 1594, respectively is reduced or if the activity “peptidase/ubiquitin-protein ligase/zinc ion binding protein (JR700)” is reduced in a plant cell, a plant or a part thereof, preferably

[0165] an increased drought resistance by surviving longer than the wild type control without showing any symptoms of injury for a period between 4 and 5 days or more and an increased biomass production compared with the wild type control without showing any symptoms of injury for a period between 0.1 and 0.1 days is conferred.

[0166] Accordingly, in one embodiment, in case the activity of the A. thaliana nucleic acid molecule or a polypeptide comprising the nucleic acid SEQ ID NO.: 1083 or polypeptide SEQ ID NO.: 1084, respectively is reduced or in case in an other organism the activity of the native homolog of said nucleic acid molecule or polypeptide is reduced, e.g. if the activity of a nucleic acid molecule or a polypeptide comprising the nucleic acid or polypeptide or the consensus sequence or the polypeptide motif, as depicted in Table I, II or IV, column 7 in the respective same line as the nucleic acid molecule SEQ ID NO.: 1083 or polypeptide SEQ ID NO.: 1084, respectively is reduced or if the activity “DC1 domain-containing protein/protein-binding protein/zinc ion binding protein” is reduced in a plant cell, a plant or a part thereof, preferably

[0167] an increased drought resistance by surviving longer than the wild type control without showing any symptoms of injury for a period between 2.2 and 4 days or more and an increased biomass production compared with the wild type control without showing any symptoms of injury for a period between 1 and 3 days is conferred.

[0168] Accordingly, in one embodiment, in case the activity of the A. thaliana nucleic acid molecule or a polypeptide comprising the nucleic acid SEQ ID NO.: 1551 or polypeptide SEQ ID NO.: 1552, respectively is reduced or in case in an other organism the activity of the native homolog of said nucleic acid molecule or polypeptide is reduced, e.g. if the activity of a nucleic acid molecule or a polypeptide comprising the nucleic acid or polypeptide or the consensus sequence or the polypeptide motif, as depicted in Table I, II or IV, column 7 in the respective same line as the nucleic acid molecule SEQ ID NO.: 1551 or polypeptide SEQ ID NO.: 1552, respectively is reduced or if the activity “1-phosphatidylinositol 4-kinase” is reduced in a plant cell, a plant or a part thereof, preferably

[0169] an increased drought resistance by surviving longer than the wild type control without showing any symptoms of injury for a period between 2.3 and 4 days or more and an increased biomass production compared with the wild type control without showing any symptoms of injury for a period between 0.7 and 2 days is conferred.

[0170] Accordingly, in one embodiment, in case the activity of the A. thaliana nucleic acid molecule or a polypeptide comprising the nucleic acid SEQ ID NO.: 1650 or polypeptide SEQ ID NO.: 1651, respectively is reduced or in case in an other organism the activity of the native homolog of said nucleic acid molecule or polypeptide is reduced, e.g. if the activity of a nucleic acid molecule or a polypeptide comprising the nucleic acid or polypeptide or the consensus sequence or the polypeptide motif, as depicted in Table I, II or IV, column 7 in the respective same line as the nucleic acid molecule SEQ ID NO.: 1650 or polypeptide SEQ ID NO.: 1651, respectively is reduced or if the activity “At3g55990-protein” is reduced in a plant cell, a plant or a part thereof, preferably an increased drought resistance by surviving longer than the wild type control without showing any symptoms of injury for a period between 4.5 and 5 days or more and an increased biomass production compared with the wild type control without showing any symptoms of injury for a period between 2.2 and 4 days is conferred.

[0171] For the purposes of the invention, as a rule the plural is intended to encompass the singular and vice versa.

[0172] Unless otherwise specified, the terms “polynucleotides”, “nucleic acid” and “nucleic acid molecule” are interchangeably in the present context. Unless otherwise specified, the terms “peptide”, “polypeptide” and “protein” are interchangeably in the present context. The term “sequence” may relate to polynucleotides, nucleic acids, nucleic acid molecules, peptides, polypeptides and proteins, depending on the context in which the term “sequence” is used. The terms “gene(s)”, “polynucleotide”, “nucleic acid sequence”, “nucleotide sequence”, or “nucleic acid molecule(s)” as used herein refers to a polymeric form of nucleotides of any length, either ribonucleotides or deoxyribonucleotides. The terms refer only to the primary structure of the molecule.

[0173] Thus, the terms “gene(s)”, “polynucleotide”, “nucleic acid sequence”, “nucleotide sequence”, or “nucleic acid molecule(s)” as used herein include double- and single-stranded DNA and/or RNA. They also include known types of modifications, for example, methylation, “caps”, substitutions of one or more of the naturally occurring nucleotides with an analog. Preferably, the DNA or RNA sequence comprises a coding sequence encoding the herein defined polypeptide.

[0174] A “coding sequence” is a nucleotide sequence, which is transcribed into an RNA, e.g. a regulatory RNA, such as a miRNA, a ta-siRNA, cosuppression molecule, an RNAi, a ribozyme, etc. or into a mRNA which is translated into a polypeptide when placed under the control of appropriate regulatory sequences. The boundaries of the coding sequence are determined by a translation start codon at the 5′-terminus and a translation stop codon at the 3′-terminus. A coding sequence can include, but is not limited to mRNA, cDNA, recombinant nucleotide sequences or genomic DNA, while introns may be present as well under certain circumstances.

[0175] As used in the present context a nucleic acid molecule may also encompass the untranslated sequence located at the 3′ and at the 5′ end of the coding gene region, for example at least 500, preferably 200, especially preferably 100, nucleotides of the sequence upstream of the 5′ end of the coding region and at least 100, preferably 50, especially preferably 20, nucleotides of the sequence downstream of the 3′ end of the coding gene region. In the event for example the antisense, RNAi, snRNA, dsRNA, siRNA, miRNA, ta-siRNA, cosuppression molecule, ribozyme etc. technology is used coding regions as well as the 5′- and/or 3′-regions can advantageously be used.

[0176] However, it is often advantageous only to choose the coding region for cloning and expression purposes.

[0177] “Polypeptide” refers to a polymer of amino acid (amino acid sequence) and does not refer to a specific length of the molecule. Thus peptides and oligopeptides are included within the definition of polypeptide. This term does also refer to or include posttranslational modifications of the polypeptide, for example, glycosylations, acetylations, phosphorylations and the like. Included within the definition are, for example, polypeptides containing one or more analogs of an amino acid (including, for example, unnatural amino acids, etc.), polypeptides with substituted linkages, as well as other modifications known in the art, both naturally occurring and non-naturally occurring.

[0178] The term “Table I” used in this specification is to be taken to specify the content of Table I A and Table I B. The term “Table II” used in this specification is to be taken to specify the content of Table II A and Table II B. The term “Table I A” used in this specification is to be taken to specify the content of Table I A. The term “Table I B” used in this specification is to be taken to specify the content of Table I B. The term “Table II A” used in this specification is to be taken to specify the content of Table II A. The term “Table II B” used in this specification is to be taken to specify the content of Table II B. In one preferred embodiment, the term “Table I” means Table I B. In one preferred embodiment, the term “Table II” means Table II B.

[0179] The terms “comprise” or “comprising” and grammatical variations thereof when used in this specification are to be taken to specify the presence of stated features, integers, steps or components or groups thereof, but not to preclude the presence or addition of one or more other features, integers, steps, components or groups thereof.

[0180] In accordance with the invention, the term “organism” as understood herein relates always to a non-human organism, in particular to a plant organism, the whole organism, tissues, organs or cell(s) thereof.

[0181] The terms “reduction”, “repression”, “decrease” or “deletion” relate to a corresponding change of a property in an organism, a part of an organism such as a tissue, seed, root, tuber, fruit, leave, flower etc. or in a cell. Under “change of a property” it is understood that the activity, expression level or amount of a gene product or a metabolite content is changed in a specific volume or in a specific amount of protein relative to a corresponding volume or amount of protein of a control, reference or wild type. Preferably, the overall activity in the volume is reduced, decreased or deleted in cases if the reduction, decrease or deletion is related to the reduction, decrease or deletion of an activity of a gene product, independent whether the amount of gene product or the specific activity of the gene product or both is reduced, decreased or deleted or whether the amount, stability or translation efficacy of the nucleic acid sequence or gene encoding for the gene product is reduced, decreased or deleted.

[0182] The terms “reduction”, “repression”, “decrease” or “deletion” include the change of said property in only parts of the subject of the present invention, for example, the modification can be found in compartment of a cell, like an organelle, or in a part of a plant, including but not limited to tissue, seed, root, leave, tuber, fruit, flower etc. but is not detectable if the overall subject, i.e. complete cell or plant, is tested. Preferably, the “reduction”, “repression”, “decrease” or “deletion” is found cellular, thus the term “reduction, decrease or deletion of an activity” or “reduction, decrease or deletion of a metabolite content” relates to the cellular reduction, decrease or deletion compared to the wild type cell. In addition the terms “reduction”, “repression”, “decrease” or “deletion” include the change of said property only during different growth phases of the organism used in the inventive process, for example the reduction, repression, decrease or deletion takes place only during the seed growth or during blooming. Furthermore the terms include a transitional reduction, decrease or deletion for example because the used method, e.g. the antisense, RNAi, snRNA, dsRNA, siRNA, miRNA, ta-siRNA, cosuppression molecule, or ribozyme, is not stable integrated in the genome of the organism or the reduction, decrease, repression or deletion is under control of a regulatory or inducible element, e.g. a chemical or otherwise inducible promoter, and has therefore only a transient effect.

[0183] Accordingly, the term “reduction”, “repression”, “decrease” or “deletion” means that the specific activity of a gene product, an enzyme or other protein or a regulatory RNA as well as the amount of a compound or metabolite, e.g. of a polypeptide, a nucleic acid molecule, or an encoding mRNA or DNA, can be reduced, decreased or deleted in a specific volume. The terms “reduction”, “repression”, “decrease” or “deletion” include that the reason for said “reduction”, “repression”, “decrease” or “deletion” could be a chemical compound that is administered to the organism or part thereof.

[0184] Throughout the specification a deletion of the activity or of the expression of an expression product, e.g. of a protein as depicted in Table II means a total loss of the activity. The terms “reduction”, “repression”, or “decrease” are interchangeable. The term “reduction” shall include the terms “repression”, “decrease” or “deletion” if not otherwise specified.

[0185] The term “reducing”, “repressing”, “decreasing” or “deleting” as used herein also comprises the term “debasing”, “depleting”, diminishing” or “bringing down”.

[0186] Reduction is also understood as meaning the modification of the substrate specificity as can be expressed for example, by the kcat/Km value. In this context, the function or activity, e.g. the enzymatic activity or the “biological activity”, is reduced by at least 10%, advantageously 20%, preferably 30%, especially preferably 40%, 50% or 60%, very especially preferably 70%, 80%, 85% or 90% or more, very especially preferably are 95%, more preferably are 99% or more in comparison to the control, reference or wild type. Most preferably the reduction, decrease or deletion in activity amounts to essentially 100%. Thus, a particularly advantageous embodiment is the inactivation of the function of a compound, e.g. a polypeptide or a nucleic acid molecule.

[0187] The reduction, repression or deletion of the expression level or of the activity leads to an increased tolerance and/or resistance to environmental stress and increased biomass production as compared to a corresponding non-transformed wild type plant of 10%, 20%, 30%, 40%, 50%, 100%, 150% or 200% or more, preferably of 250% or 300% or more, particularly preferably of 350% or 400% or more, most particularly preferably of 500% or 600% w/w, or more, expressed in the time the transgenic plant survives longer under conditions of dessication and/or without watering and/or expressed in the time the transgenic plant shows a higher biomass production in comparison to the reference or wild type.

[0188] The term “activity” of a compound refers to the function of a compound in a biological system such as a cell, an organ or an organism. For example, the term “activity” of a compound refers to the enzymatic function, regulatory function or its function as binding partner, transporter, regulator, or carrier, etc of a compound.

[0189] In one embodiment, the term “biological activity” refers to an activity selected from the group consisting of:
[0190] 1-phosphatidylinositol 4-kinase, amino acid permease (AAP1), At3g55990-protein, At5g40590-protein, ATP-dependent peptidase/ATPase/nucleoside-triphosphatase/serine-type endopeptidase, DC1 domain-containing protein/protein-binding protein/zinc ion binding protein, DNA binding protein/transcription factor, hydro-lyase/aconitate hydratase, metalloexopeptidase (MAP1C), methyltransferase, nitrate transporter (ATNRT2.3), nitrate/chlorate transporter (NRT1.1), pectate lyase protein/powdery mildew susceptibility protein (PMR6), peptidase/ubiquitin-protein ligase/zinc ion binding protein (JR700), proton-dependent oligopeptide transport protein, transcription factor, and ubiquitin conjugating enzyme/ubiquitin-like activating enzyme, according to the corresponding context.

[0191] The terms “enhance”, “increase”, “decrease”, “repress” or “reduce” or similar terms include the change or the modulation of said property in only one or some parts as well as in all parts of the subject of the present invention. For example, the modification can be found in compartment of a cell, like an organelle, or preferably in a part of a plant, like a tissue, seed, root, leave, fruit, tuber, flower etc. but is not detectable if the overall subject, i.e. complete cell or plant, is tested.

[0192] More preferred is the finding that a change or a modulation of said property is found in more than one part of an organism, particularly of a plant.

[0193] Thus, in one embodiment, the change or the modulation of said property is found in a tissue, seed, root, fruit, tuber, leave and/or flower of a plant produced according to the process of the present invention.

[0194] However, the terms “enhance”, “increase”, “decrease”, “repress” or “reduce” or similar terms as used herein also include the change or modulation of said property in the whole organism as mentioned.

[0195] The terms “enhanced” or “increase” mean a 10%, 20%, 30%, 40% or 50% or higher, preferably at least a 60%, 70%, 80%, 90% or 100% or higher, more preferably 150%, 200%, 300%, 400% or 500% or higher tolerance and/or resistance to environmental stress and increased biomass production as compared to a corresponding non-transformed wild type plant. In one embodiment, the increase is calculated as in the examples shown.

[0196] As used herein, the term “environmental stress” refers to any suboptimal growing condition and includes, but is not limited to, sub-optimal conditions associated with drought, cold or salinity or combinations thereof. In preferred embodiments, environmental stress is drought and low water content. Wherein drought stress means any environmental stress which leads to a lack of water in plants or reduction of water supply to plants.

[0197] In one embodiment of the invention the term “increased tolerance and/or resistance to environmental stress” relates to an increased resistance to water stress, which is produced as a secondary stress by cold, salt, and of course, as a primary stress during drought.

[0198] In one embodiment of the invention the term “increased tolerance and/or resistance to environmental stress” relates to an increased cold resistance.

[0199] In one embodiment of the invention the term “increased cold resistance” relates to low temperature tolerance, comprising freezing tolerance and/or chilling tolerance.

[0200] Further, improved or enhanced “chilling tolerance” or variations thereof refers to improved adaptation to low but non-freezing temperatures around 10° C., preferably temperatures between 1 to 18° C., more preferably 4-14° C., and most preferred 8 to 12° C.; hereinafter called “chilling temperature.

[0201] Improved or enhanced “freezing tolerance” or variations thereof refers to improved adaptation to temperatures near or below zero, namely preferably temperatures below 4° C., more preferably below 3 or 2° C., and particularly preferred at or below 0 (zero) ° C. or below −4° C., or even extremely low temperatures down to -10° C. or lower; hereinafter called “freezing temperature.

[0202] More generally, “improved adaptation” to environmental stress like low temperatures e.g. freezing and/or chilling temperatures refers to increased biomass production as compared to a corresponding non-transformed wild type plant.

[0203] Accordingly, for the purposes of the description of the present invention, the term “low temperature” with respect to low temperature stress on a plant, and preferably a crop plant, refers to any of the low temperature conditions as described herein, preferably chilling and/or freezing temperatures as defined above, as the context requires. It is understood that a skilled artisan will be able to recognize from the particular context in the present description which temperature or temperature range is meant by “low temperature”.

[0204] In the present invention, enhanced tolerance to low temperature may, for example and preferably, be determined according to the following method:

[0205] Transformed plants are grown in pots in a growth chamber (e.g. York, Mannheim, Germany). In case the plants are Arabidopsis thaliana seeds thereof are sown in pots containing a 3.5:1 (v:v) mixture of nutrient rich soil (GS90, Tantau, Wansdorf, Germany). Plants are grown under standard growth conditions. In case the plants are Arabidopsis thaliana, the standard growth conditions are: photoperiod of 16 h light and 8 h dark, 20° C., 60% relative humidity, and a photon flux density of 200 pmol/m²s. Plants are grown and cultured. In case the plants are Arabidopsis thaliana they are watered every second day. After 12 to 13 days the plants are individualized. Cold (e.g. chilling at 11-12° C.) is applied 14 days after sowing until the end of the experiment. For measuring biomass performance, plant fresh weight was determined at harvest time (29-30 days after sowing) by cutting shoots and weighing them. Beside weighing, phenotypic information was added in case of plants that differ from the wild type control.

[0206] In one embodiment of the invention the term “ increased tolerance and/or resistance to environmental stress” relates to an increased salt resistance.

[0207] In a preferred embodiment of the invention the term “ increased tolerance and/or resistance to environmental stress” relates to an increased drought resistance.

[0208] In an other preferred embodiment of the invention the term “ increased tolerance and/or resistance to environmental stress” relates to an increased resistance to water stress, e.g. drought, cold and salt resistance. Water stress relates to conditions of low water or desiccation.

[0209] In one embodiment of the invention the term “increased tolerance and/or resistance to environmental stress” is defined as survival of plants under drought conditions longer than non-transformed wild type plant.

[0210] Drought conditions means under conditions of water deficiency, in other words the plants survives and growth under conditions of water deficiency in Arabidopsis for a period of at least 10, preferably 11, 12, more preferably 13 day or more without showing any symptoms of injury, such as wilting and leaf browning and/or rolling, on the other hand the plants being visually turgid and healthy green in color.

[0211] In one embodiment of the invention the term “increased biomass production” means that the plants exhibit an increased growth rate from the starting of withholding water as compared to a corresponding non-transformed wild type plant. An increased growth rate comprises an increased in biomass production of the whole plant, an increase in biomass of the visible part of the plant, e.g. of stem and leaves and florescence, visible higher and larger stem.

[0212] In one embodiment increased biomass production includes higher seed yield, higher photosynthesis and/or higher dry matter production.

[0213] In one embodiment of the invention the term “increased biomass production” means that the plants exhibit an prolonged growth from the starting of withholding water as compared to a corresponding non-transformed wild type plant. An prolonged growth comprises survival and/or continued growth of the whole plant at the moment when the non-transformed wild type plants show visual symptoms of injury.

[0214] In one embodiment of the invention the term “increased biomass production” means that the plants exhibit an increased growth rate and prolonged growth from the starting of withholding water as compared to a corresponding non-transformed wild type plant.

[0215] In one embodiment of the invention the increased drought resistance is determinated and quantified according to the following method:

[0216] Transformed plants are grown individually in pots in a growth chamber (York Industriekälte GmbH, Mannheim, Germany).

[0217] Germination is induced. In case the plants are Arabidopsis thaliana sown seeds are kept at 4° C., in the dark, for 3 days in order to induce germination. Subsequently conditions are changed for 3 days to 20° C./6° C. day/night temperature with a 16/8 h day-night cycle at 150 μE/m²s.

[0218] Subsequently the plants are grown under standard growth conditions. In case the plants are Arabidopsis thaliana, the standard growth conditions are: photoperiod of 16 h light and 8 h dark, 20° C., 60% relative humidity, and a photon flux density of 200 μE. Plants are grown and cultured until they develop leaves. In case the plants are Arabidopsis thaliana they are watered daily until they were approximately 3 weeks old. Starting at that time drought was imposed by withholding water.

[0219] After the non-transformed wild type plants show visual symptoms of injury, the evaluation starts and plants are scored for symptoms of drought symptoms and biomass production comparison to wild type and neighboring plants for 5-6 days in succession.

[0220] Visual symptoms of injury stating for one or any combination of two, three or more of the following features:
[0221] a) wilting
[0222] b) leaf browning
[0223] c) loss of turgor, which results in drooping of leaves or needles stems, and flowers,
[0224] d) drooping and/or shedding of leaves or needles,
[0225] e) the leaves are green but leaf angled slightly toward the ground compared with controls,
[0226] f) leaf blades begun to fold (curl) inward,
[0227] g) premature senescence of leaves or needles,
[0228] h) loss of chlorophyll in leaves or needles and/or yellowing.

[0229] The term “reference”, “control” or “wild type” mean an organism without the aforementioned modification of the expression or activity of an expression product of a nucleic acid molecule comprising a polynucleotide indicated in Table I, column 5 or 7 or of the activity of a protein having the activity of a polypeptide comprising a polypeptide indicated in Table II or IV, column 5 or 7, or of the activity of a protein encoded by nucleic acid molecule comprising a nucleic acid molecule indicated in Table I, column 5 or 7.

[0230] In other words wild type denotes (a) the organism which carries the unaltered (usually the “normal”) form of a gene or allele; (b) the laboratory stock from which mutants are derived. The adjective “wild-type” may refer to the phenotype or genotype.

[0231] A “reference”, “control” or “wild type” is in particular a cell, a tissue, an organ, a plant, or a part thereof, which was not produced according to the process of the invention.

[0232] Accordingly, the terms “wild type”, “control” or “reference” are exchangeable and can be a cell or a part of organisms such as an organelle or tissue, or an organism, in particular a plant, which was not modified or treated according to the herein described process according to the invention. Accordingly, the cell or a part of organisms such as an organelle or a tissue, or an organism, in particular a plant used as wild type, control or reference corresponds to the cell, organism or part thereof as much as possible and is in any other property but in the result of the process of the invention as identical to the subject matter of the invention as possible. Thus, the wild type, control or reference is treated identically or as identical as possible, saying that only conditions or properties might be different which do not influence the quality of the tested property.

[0233] Preferably, any comparison is carried out under analogous conditions. The term “analogous conditions” means that all conditions such as, for example, culture or growing conditions, assay conditions (such as buffer composition, temperature, substrates, pathogen strain, concentrations and the like) are kept identical between the experiments to be compared.

[0234] The “reference”, “control”, or “wild type” is preferably a subject, e.g. an organelle, a cell, a tissue, an organism, in particular a plant, which was not modified or treated according to the herein described process of the invention and is in any other property as similar to the subject matter of the invention as possible. The reference, control or wild type is in its genome, transcriptome, proteome or metabolome as similar as possible to the subject of the present invention. Preferably, the term “reference-” “control-” or “wild type-”-organelle, -cell, -tissue or -organism, in particular plant, relates to an organelle, cell, tissue or organism, in particular plant, which is nearly genetically identical to the organelle, cell, tissue or organism, in particular plant, of the present invention or a part thereof preferably 95%, more preferred are 98%, even more preferred are 99.00%, in particular 99.10%, 99.30%, 99.50%, 99.70%, 99.90%, 99.99%, 99.999% or more. Most preferable the “reference”, “control”, or “wild type” is preferably a subject, e.g. an organelle, a cell, a tissue, an organism, which is genetically identical to the organism, cell organelle used according to the process of the invention except that nucleic acid molecules or the gene product encoded by them are changed or modified according to the inventive process.

[0235] In case, a control, reference or wild type differing from the subject of the present invention only by not being subject of the process of the invention can not be provided, a control, reference or wild type can be an organism in which the cause for the modulation of the activity conferring the increase of tolerance and/or resistance to environmental stress and increase of biomass production as described herein has been switched back or off, e.g. by complementation of responsible reduced gene product, e.g. by stable or transient (over)expression, by activation of an activator or agonist, by inactivation of an inhibitor or antagonist, by adding active compounds as e.g. hormones, by introducing enhancers etc.

[0236] Accordingly, preferred reference subject is the starting subject of the present process of the invention.

[0237] Preferably, the reference and the subject matter of the invention are compared after standardization and normalization, e.g. to the amount of total RNA, DNA, or protein or activity or expression of reference genes, like housekeeping genes, such as certain actin or ubiquitin genes.

[0238] Preferably, the reference, control or wild type differs form the subject of the present invention only in the cellular activity of the polypeptide or RNA used in the process of the invention, e.g. as result of a reduction, decrease or deletion in the level of the nucleic acid molecule of the present invention or a reduction, decrease or deletion of the specific activity of the polypeptide or RNA used in the process of the invention, e.g. by the expression level or activity of protein or RNA, that means by reduction or inhibition of its biological activity and/or of its biochemical or genetical causes.

[0239] The term “expression” refers to the transcription and/or translation of a codogenic gene segment or gene. As a rule, the resulting product is a mRNA or a protein. However, expression products can also include functional RNAs such as, for example, antisense, tRNAs, snRNAs, rRNAs, dsRNAs, siRNAs, miRNAs, ta-siRNA, cosuppression molecules, ribozymes etc. Expression may be systemic, local or temporal, for example limited to certain cell types, tissues organs or time periods.

[0240] The term “expression” means the transcription of a gene into an RNA (e.g. rRNA, tRNA, miRNA, dsRNA, snRNA, ta-siRNA, sRNA) or messenger RNA (mRNA). Thus, term “expression” means the expression of a gene with or without the subsequent translation of the latter into a protein. Experimentally, expression on RNA level can be detected by methods well known, e.g. Northern blotting, array hybridizations, qRT PCR, transcriptional run-on assays. Further, experimentally, expression on polypeptide level can be detected by methods well known, e.g. Western blotting or other immuno assays.

[0241] The term “functional equivalent” of a polypeptide as depicted in column 5 or 7 of Table II is a polypeptide which confers essentially the activity of a polypeptide as depicted in column 5 Table II.

[0242] The term “functional equivalent” of a nucleic acid molecule as depicted in column 5 or 7 of Table I is a polynucleotide which confers essentially the activity of a nucleic acid molecule as depicted in column 5 of Table I.

[0243] In accordance with the invention, a protein or polypeptide has the activity of a polypeptide as depicted in column 5 of Table II if the reduction, repression, decrease or deletion of its activity mediates the increased tolerance and/or resistance to environmental stress and increased biomass production as compared to a corresponding non-transformed wild type plant.

[0244] In particular, a protein or polypeptide has the activity of a polypeptide as depicted in column 5 of Table II if the reduction, repression, decrease or deletion of its activity mediates the increased tolerance and/or resistance to environmental stress and increased biomass production as compared to a corresponding non-transformed wild type plant.

[0245] In accordance with the invention, a nucleic acid molecule or polynucleotide has the activity of a nucleic acid molecule as depicted in column 5 of Table I″ if the reduction, repression, decrease or deletion of its expression mediates the increased tolerance and/or resistance to environmental stress and increased biomass production as compared to a corresponding non-transformed wild type plant.

[0246] That means for example that the reduction, repression or deletion of an expression, like the expression of a gene product, or of an activity like an enzymatic activity, is somehow related to the increased tolerance and/or resistance to environmental stress and increased biomass production as compared to a corresponding nontransformed wild type plant.

[0247] Throughout the specification the reduction, repression or deletion of the activity of such an aforementioned protein or polypeptide or of the expression product of such an aforementioned nucleic acid molecule or sequence means a reduction of the translation, transcription or expression level or activity of the gene product or the polypeptide, for example the enzymatic or biological activity of the polypeptide, of at least 10% preferably 20%, 30%, 40% or 50%, particularly preferably 60% 70% or 80%, most particularly preferably 90%, 91%, 92%, 93%, 94%, 95%, 96%, 97%, 98% or 99% in comparison to the original endogenous expression level of the expression product or to the original endogenous activity of an expression product or polypeptide comprising or being encoded by a nucleic acid molecule as indicated in column 5 or 7 of Table I or comprising a polypeptide as indicated in column 5 or 7 of Table II or IV or the endogenous homologue or equivalent thereof.

[0248] Further, the person skilled in the art can determine whether a polypeptide has the “activity of a polypeptide as depicted in column 5 of Table II” in a complementation assay.

[0249] Further, the person skilled in the art can determine whether a nucleic acid molecule has the “activity of a nucleic acid molecule as depicted in column 5 of Table I” in a complementation assay.

[0250] The specific activity of a polypeptide or a nucleic acid molecule as described herein for use in the process of the present invention can be tested as described in the examples or in the state of the art. In particular, determination whether the expression of a polynucleotide or a polypeptide in question is reduced, decreased or deleted in a plant cell and the detection of an increased tolerance and/or resistance to environmental stress and increased biomass production as compared to a corresponding non-transformed wild type plant is an easy test and can be performed as described in the examples or in the state of the art.

[0251] In order to test whether a nucleic acid molecule, e.g. a gene, is a functional homologue of a nucleic acid molecule depicted in columns 5 or 7, in particular depicted in column 5, a complementation assay in a microorganism or a plant can be performed. For example, a plant lacking the activity of the gene, e.g. a Arabidopsis thaliana strain in which a nucleic acid molecule comprising the nucleic acid molecule has been knocked out, in particular deleted or interrupted, can be transformed with the respective nucleic acid molecule in question, e.g. a gene or homologue, under control of a suitable promoter, e.g. in a suitable vector. The promoter may either confer constitutive or transient or tissue or development specific or inducible expression. Preferably the promoter may be similar or identical in spatial and temporal activity to the promoter of the gene, which has been knock out, deleted or interrupted. The nucleic acid molecule in question, e.g. the gene or the homologue to be tested preferably comprises the complete coding region either with or without introns(s). In addition, it might be preferable to add 5′and 3′ UTR or other features to the sequence in order to increase stability or translation of the transcript.

[0252] Transformed plants are analyzed for the presence of the respective construct and the expression of the nucleic acid molecule in question, e.g. the gene or homologue, or its expression product. Plants exhibiting expression of the gene or homologue are compared to wild type plants. The transgenic plant, comprising a knockout mutation and expressing the respective gene or homologue is essentially identical to wild type controls with regard to the change in the tolerance and/or resistance to environmental stress and biomass production as compared to a corresponding non-transformed wild type plant.

[0253] A qualified complementation assay is for example described in Iba K (1993) Journal of Biological Chemistry 268 (32) pp 24099-24105, Bonaventure G et al (2003) Plant Growth. Plant Cell 15 pp 1020-1033, or in Gachotte D et al (1995) Plant Journal 8 (3) pp 407-416.

[0254] The sequence of At5g50870 from Arabidopsis thaliana, e.g. as shown incolumn 5 of Table I, has been published in the TAIR database http://www.arabidopsis.org (Huala, E. et al., Nucleic Acids Res. 2001 Vol. 29(1), 102-5), and its activity is described as ubiquitin conjugating enzyme/ubiquitin-like activating enzyme.

[0255] Accordingly, in one embodiment, the process of the present invention comprises the reduction of a gene product with the activity of a “ubiquitin conjugating enzyme/ubiquitin-like activating enzyme” from Arabidopsis thaliana or its functional equivalent or its homolog, e.g. the reduction of
[0256] a) a gene product of a gene comprising the nucleic acid molecule as shown in column 5 of Table I and being depicted in the same respective line as said At5g50870 or a functional equivalent or a homologue thereof as depicted in column 7 of Table I, preferably a homologue or functional equivalent as depicted in column 7 of Table I B, and being depicted in the same respective line as said At5g50870; or
[0257] b) a polypeptide comprising a polypeptide, a consensus sequence or a polypeptide motif as depicted in column 5 of Table II or column 7 of table IV respectively, and being depicted in the same respective line as said At5g50870 or a functional equivalent or a homologue thereof as depicted in column 7 of Table II, preferably a homologue or functional equivalent as depicted in column 7 of Table II B, and being depicted in the same respective line as said At5g50870,
   as mentioned herein, for the increased tolerance and/or resistance to environmental stress and increased biomass production as compared to a corresponding non-transformed wild type plant.

[0258] Accordingly, in one embodiment, the molecule which activity is to be reduced in the process of the invention is the gene product with an activity described as “ubiquitin conjugating enzyme/ubiquitin-like activating enzyme”, preferably it is the molecule of section (a) or (b) of this paragraph [0024.1.1.1].

[0259] The sequence of At4g31120 from Arabidopsis thaliana, e.g. as shown incolumn 5 of Table I, has been published in the TAIR database http://www.arabidopsis.org (Huala, E. et al., Nucleic Acids Res. 2001 Vol. 29(1), 102-5), and its activity is described as methyltransferase.

[0260] Accordingly, in one embodiment, the process of the present invention comprises the reduction of a gene product with the activity of a “methyltransferase” from Arabidopsis thaliana or its functional equivalent or its homolog, e.g. the reduction of
[0261] a) a gene product of a gene comprising the nucleic acid molecule as shown in column 5 of Table I and being depicted in the same respective line as said At4g31120 or a functional equivalent or a homologue thereof as depicted in column 7 of Table I, preferably a homologue or functional equivalent as depicted in column 7 of Table I B, and being depicted in the same respective line as said At4g31120; or
[0262] b) a polypeptide comprising a polypeptide, a consensus sequence or a polypeptide motif as depicted in column 5 of Table II or column 7 of table IV respectively, and being depicted in the same respective line as said At4g31120 or a functional equivalent or a homologue thereof as depicted in column 7 of Table II, preferably a homologue or functional equivalent as depicted in column 7 of Table II B, and being depicted in the same respective line as said At4g31120,
   as mentioned herein, for the increased tolerance and/or resistance to environmental stress and increased biomass production as compared to a corresponding non-transformed wild type plant.

[0263] Accordingly, in one embodiment, the molecule which activity is to be reduced in the process of the invention is the gene product with an activity described as “methyltransferase”, preferably it is the molecule of section (a) or (b) of this paragraph [0024.1.1.1].

[0264] The sequence of At3g14230 from Arabidopsis thaliana, e.g. as shown incolumn 5 of Table I, has been published in the TAIR database http://www.arabidopsis.org (Huala, E. et al., Nucleic Acids Res. 2001 Vol. 29(1), 102-5), and its activity is described as transcription factor.

[0265] Accordingly, in one embodiment, the process of the present invention comprises the reduction of a gene product with the activity of a “transcription factor” from Arabidopsis thaliana or its functional equivalent or its homolog, e.g. the reduction of
[0266] a) a gene product of a gene comprising the nucleic acid molecule as shown in column 5 of Table I and being depicted in the same respective line as said At3g14230 or a functional equivalent or a homologue thereof as depicted in column 7 of Table I, preferably a homologue or functional equivalent as depicted in column 7 of Table I B, and being depicted in the same respective line as said At3g14230; or
[0267] b) a polypeptide comprising a polypeptide, a consensus sequence or a polypeptide motif as depicted in column 5 of Table II or column 7 of table IV respectively, and being depicted in the same respective line as said At3g14230 or a functional equivalent or a homologue thereof as depicted in column 7 of Table II, preferably a homologue or functional equivalent as depicted in column 7 of Table II B, and being depicted in the same respective line as said At3g14230,
   as mentioned herein, for the increased tolerance and/or resistance to environmental stress and increased biomass production as compared to a corresponding non-transformed wild type plant.

[0268] Accordingly, in one embodiment, the molecule which activity is to be reduced in the process of the invention is the gene product with an activity described as “transcription factor”, preferably it is the molecule of section (a) or (b) of this paragraph [0024.1.1.1].

[0269] The sequence of At1g12110 from Arabidopsis thaliana, e.g. as shown incolumn 5 of Table I, has been published in the TAIR database http://www.arabidopsis.org (Huala, E. et al., Nucleic Acids Res. 2001 Vol. 29(1), 102-5), and its activity is described as nitrate/chlorate transporter (NRT1.1).

[0270] Accordingly, in one embodiment, the process of the present invention comprises the reduction of a gene product with the activity of a “nitrate/chlorate transporter (NRT1.1)” from Arabidopsis thaliana or its functional equivalent or its homolog, e.g. the reduction of
[0271] a) a gene product of a gene comprising the nucleic acid molecule as shown in column 5 of Table I and being depicted in the same respective line as said At1g12110 or a functional equivalent or a homologue thereof as depicted in column 7 of Table I, preferably a homologue or functional equivalent as depicted in column 7 of Table I B, and being depicted in the same respective line as said At1g12110; or
[0272] b) a polypeptide comprising a polypeptide, a consensus sequence or a polypeptide motif as depicted in column 5 of Table II or column 7 of table IV respectively, and being depicted in the same respective line as said At1g12110 or a functional equivalent or a homologue thereof as depicted in column 7 of Table II, preferably a homologue or functional equivalent as depicted in column 7 of Table II B, and being depicted in the same respective line as said At1g12110,
   as mentioned herein, for the increased tolerance and/or resistance to environmental stress and increased biomass production as compared to a corresponding non-transformed wild type plant.

[0273] Accordingly, in one embodiment, the molecule which activity is to be reduced in the process of the invention is the gene product with an activity described as “nitrate/chlorate transporter (NRT1.1)”, preferably it is the molecule of section (a) or (b) of this paragraph [0024.1.1.1].

[0274] The sequence of At1g13270 from Arabidopsis thaliana, e.g. as shown incolumn 5 of Table I, has been published in the TAIR database http://www.arabidopsis.org (Huala, E. et al., Nucleic Acids Res. 2001 Vol. 29(1), 102-5), and its activity is described as metalloexopeptidase (MAP1C).

[0275] Accordingly, in one embodiment, the process of the present invention comprises the reduction of a gene product with the activity of a “metalloexopeptidase (MAP1C)” from Arabidopsis thaliana or its functional equivalent or its homolog, e.g. the reduction of
[0276] a) a gene product of a gene comprising the nucleic acid molecule as shown in column 5 of Table I and being depicted in the same respective line as said At1g13270 or a functional equivalent or a homologue thereof as depicted in column 7 of Table I, preferably a homologue or functional equivalent as depicted in column 7 of Table I B, and being depicted in the same respective line as said At1g13270; or
[0277] b) a polypeptide comprising a polypeptide, a consensus sequence or a polypeptide motif as depicted in column 5 of Table II or column 7 of table IV respectively, and being depicted in the same respective line as said At1g13270 or a functional equivalent or a homologue thereof as depicted in column 7 of Table II, preferably a homologue or functional equivalent as depicted in column 7 of Table II B, and being depicted in the same respective line as said At1g13270,
   as mentioned herein, for the increased tolerance and/or resistance to environmental stress and increased biomass production as compared to a corresponding non-transformed wild type plant.

[0278] Accordingly, in one embodiment, the molecule which activity is to be reduced in the process of the invention is the gene product with an activity described as “metalloexopeptidase (MAP1 C)”, preferably it is the molecule of section (a) or (b) of this paragraph [0024.1.1.1].

[0279] The sequence of At1g27080 from Arabidopsis thaliana, e.g. as shown incolumn 5 of Table I, has been published in the TAIR database http://www.arabidopsis.org (Huala, E. et al., Nucleic Acids Res. 2001 Vol. 29(1), 102-5), and its activity is described as proton-dependent oligopeptide transport protein.

[0280] Accordingly, in one embodiment, the process of the present invention comprises the reduction of a gene product with the activity of a “proton-dependent oligopeptide transport protein” from Arabidopsis thaliana or its functional equivalent or its homolog, e.g. the reduction of
[0281] a) a gene product of a gene comprising the nucleic acid molecule as shown in column 5 of Table I and being depicted in the same respective line as said At1g27080 or a functional equivalent or a homologue thereof as depicted in column 7 of Table I, preferably a homologue or functional equivalent as depicted in column 7 of Table I B, and being depicted in the same respective line as said At1g27080; or
[0282] b) a polypeptide comprising a polypeptide, a consensus sequence or a polypeptide motif as depicted in column 5 of Table II or column 7 of table IV respectively, and being depicted in the same respective line as said At1g27080 or a functional equivalent or a homologue thereof as depicted in column 7 of Table II, preferably a homologue or functional equivalent as depicted in column 7 of Table II B, and being depicted in the same respective line as said At1g27080,
   as mentioned herein, for the increased tolerance and/or resistance to environmental stress and increased biomass production as compared to a corresponding non-transformed wild type plant.

[0283] Accordingly, in one embodiment, the molecule which activity is to be reduced in the process of the invention is the gene product with an activity described as “proton-dependent oligopeptide transport protein”, preferably it is the molecule of section (a) or (b) of this paragraph [0024.1.1.1].

[0284] The sequence of AT1G58360 from Arabidopsis thaliana, e.g. as shown incolumn 5 of Table I, has been published in the TAIR database http://www.arabidopsis.org (Huala, E. et al., Nucleic Acids Res. 2001 Vol. 29(1), 102-5), and its activity is described as amino acid permease (AAP1).

[0285] Accordingly, in one embodiment, the process of the present invention comprises the reduction of a gene product with the activity of a “amino acid permease (AAP1)” from Arabidopsis thaliana or its functional equivalent or its homolog, e.g. the reduction of
[0286] a) a gene product of a gene comprising the nucleic acid molecule as shown in column 5 of Table I and being depicted in the same respective line as said AT1G58360 or a functional equivalent or a homologue thereof as depicted in column 7 of Table I, preferably a homologue or functional equivalent as depicted in column 7 of Table I B, and being depicted in the same respective line as said AT1G58360; or
[0287] b) a polypeptide comprising a polypeptide, a consensus sequence or a polypeptide motif as depicted in column 5 of Table II or column 7 of table IV respectively, and being depicted in the same respective line as said AT1G58360 or a functional equivalent or a homologue thereof as depicted in column 7 of Table II, preferably a homologue or functional equivalent as depicted in column 7 of Table II B, and being depicted in the same respective line as said AT1G58360,
   as mentioned herein, for the increased tolerance and/or resistance to environmental stress and increased biomass production as compared to a corresponding non-transformed wild type plant.

[0288] Accordingly, in one embodiment, the molecule which activity is to be reduced in the process of the invention is the gene product with an activity described as “amino acid permease (AAP1)”, preferably it is the molecule of section (a) or (b) of this paragraph [0024.1.1.1].

[0289] The sequence of At5g60780 from Arabidopsis thaliana, e.g. as shown incolumn 5 of Table I, has been published in the TAIR database http://www.arabidopsis.org (Huala, E. et al., Nucleic Acids Res. 2001 Vol. 29(1), 102-5), and its activity is described as nitrate transporter (ATNRT2.3).

[0290] Accordingly, in one embodiment, the process of the present invention comprises the reduction of a gene product with the activity of a “nitrate transporter (ATNRT2.3)” from Arabidopsis thaliana or its functional equivalent or its homolog, e.g. the reduction of
[0291] a) a gene product of a gene comprising the nucleic acid molecule as shown in column 5 of Table I and being depicted in the same respective line as said At5g60780 or a functional equivalent or a homologue thereof as depicted in column 7 of Table I, preferably a homologue or functional equivalent as depicted in column 7 of Table I B, and being depicted in the same respective line as said At5g60780; or
[0292] b) a polypeptide comprising a polypeptide, a consensus sequence or a polypeptide motif as depicted in column 5 of Table II or column 7 of table IV respectively, and being depicted in the same respective line as said At5g60780 or a functional equivalent or a homologue thereof as depicted in column 7 of Table II , preferably a homologue or functional equivalent as depicted in column 7 of Table II B, and being depicted in the same respective line as said At5g60780,
   as mentioned herein, for the increased tolerance and/or resistance to environmental stress and increased biomass production as compared to a corresponding non-transformed wild type plant.

[0293] Accordingly, in one embodiment, the molecule which activity is to be reduced in the process of the invention is the gene product with an activity described as “nitrate transporter (ATNRT2.3)”, preferably it is the molecule of section (a) or (b) of this paragraph [0024.1.1.1].

[0294] The sequence of At3g54920 from Arabidopsis thaliana, e.g. as shown incolumn 5 of Table I, has been published in the TAIR database http://www.arabidopsis.org (Huala, E. et al., Nucleic Acids Res. 2001 Vol. 29(1), 102-5), and its activity is described as pectate lyase protein/powdery mildew susceptibility protein (PMR6).

[0295] Accordingly, in one embodiment, the process of the present invention comprises the reduction of a gene product with the activity of a “pectate lyase protein/powdery mildew susceptibility protein (PMR6)” from Arabidopsis thaliana or its functional equivalent or its homolog, e.g. the reduction of
[0296] a) a gene product of a gene comprising the nucleic acid molecule as shown in column 5 of Table I and being depicted in the same respective line as said At3g54920 or a functional equivalent or a homologue thereof as depicted in column 7 of Table I, preferably a homologue or functional equivalent as depicted in column 7 of Table I B, and being depicted in the same respective line as said At3g54920; or
[0297] b) a polypeptide comprising a polypeptide, a consensus sequence or a polypeptide motif as depicted in column 5 of Table II or column 7 of table IV respectively, and being depicted in the same respective line as said At3g54920 or a functional equivalent or a homologue thereof as depicted in column 7 of Table II, preferably a homologue or functional equivalent as depicted in column 7 of Table II B, and being depicted in the same respective line as said At3g54920,
   as mentioned herein, for the increased tolerance and/or resistance to environmental stress and increased biomass production as compared to a corresponding non-transformed wild type plant.

[0298] Accordingly, in one embodiment, the molecule which activity is to be reduced in the process of the invention is the gene product with an activity described as “pectate lyase protein/powdery mildew susceptibility protein (PMR6)”, preferably it is the molecule of section (a) or (b) of this paragraph [0024.1.1.1].

[0299] The sequence of AT2G03670 from Arabidopsis thaliana, e.g. as shown incolumn 5 of Table I, has been published in the TAIR database http://www.arabidopsis.org (Huala, E. et al., Nucleic Acids Res. 2001 Vol. 29(1), 102-5), and its activity is described as ATP-dependent peptidase/ATPase/nucleoside-triphosphatase/serine-type endopeptidase.

[0300] Accordingly, in one embodiment, the process of the present invention comprises the reduction of a gene product with the activity of a “ATP-dependent peptidase/ATPase/nucleoside-triphosphatase/serine-type endopeptidase” from Arabidopsis thaliana or its functional equivalent or its homolog, e.g. the reduction of
[0301] a) a gene product of a gene comprising the nucleic acid molecule as shown in column 5 of Table I and being depicted in the same respective line as said AT2G03670 or a functional equivalent or a homologue thereof as depicted in column 7 of Table I, preferably a homologue or functional equivalent as depicted in column 7 of Table I B, and being depicted in the same respective line as said AT2G03670; or
[0302] b) a polypeptide comprising a polypeptide, a consensus sequence or a polypeptide motif as depicted in column 5 of Table II or column 7 of table IV respectively, and being depicted in the same respective line as said AT2G03670 or a functional equivalent or a homologue thereof as depicted in column 7 of Table II, preferably a homologue or functional equivalent as depicted in column 7 of Table II B, and being depicted in the same respective line as said AT2G03670,
   as mentioned herein, for the increased tolerance and/or resistance to environmental stress and increased biomass production as compared to a corresponding non-transformed wild type plant.

[0303] Accordingly, in one embodiment, the molecule which activity is to be reduced in the process of the invention is the gene product with an activity described as “ATP-dependent peptidase/ATPase/nucleoside-triphosphatase/serine-type endopeptidase”, preferably it is the molecule of section (a) or (b) of this paragraph [0024.1.1.1].

[0304] The sequence of At1g12110 from Arabidopsis thaliana, e.g. as shown incolumn 5 of Table I, has been published in the TAIR database http://www.arabidopsis.org (Huala, E. et al., Nucleic Acids Res. 2001 Vol. 29(1), 102-5), and its activity is described as nitrate/chlorate transporter (NRT1.1).

[0305] Accordingly, in one embodiment, the process of the present invention comprises the reduction of a gene product with the activity of a “nitrate/chlorate transporter (NRT1.1)” from Arabidopsis thaliana or its functional equivalent or its homolog, e.g. the reduction of
[0306] a) a gene product of a gene comprising the nucleic acid molecule as shown in column 5 of Table I and being depicted in the same respective line as said At1g12110 or a functional equivalent or a homologue thereof as depicted in column 7 of Table I, preferably a homologue or functional equivalent as depicted in column 7 of Table I B, and being depicted in the same respective line as said At1g12110; or
[0307] b) a polypeptide comprising a polypeptide, a consensus sequence or a polypeptide motif as depicted in column 5 of Table II or column 7 of table IV respectively, and being depicted in the same respective line as said At1g12110 or a functional equivalent or a homologue thereof as depicted in column 7 of Table II, preferably a homologue or functional equivalent as depicted in column 7 of Table II B, and being depicted in the same respective line as said At1g12110,
   as mentioned herein, for the increased tolerance and/or resistance to environmental stress and increased biomass production as compared to a corresponding non-transformed wild type plant.

[0308] Accordingly, in one embodiment, the molecule which activity is to be reduced in the process of the invention is the gene product with an activity described as “nitrate/chlorate transporter (NRT1.1)”, preferably it is the molecule of section (a) or (b) of this paragraph [0024.1.1.1].

[0309] The sequence of AT1G58360 from Arabidopsis thaliana, e.g. as shown incolumn 5 of Table I, has been published in the TAIR database http://www.arabidopsis.org (Huala, E. et al., Nucleic Acids Res. 2001 Vol. 29(1), 102-5), and its activity is described as amino acid permease (AAP1).

[0310] Accordingly, in one embodiment, the process of the present invention comprises the reduction of a gene product with the activity of a “amino acid permease (AAP1)” from Arabidopsis thaliana or its functional equivalent or its homolog, e.g. the reduction of
[0311] a) a gene product of a gene comprising the nucleic acid molecule as shown in column 5 of Table I and being depicted in the same respective line as said AT1G58360 or a functional equivalent or a homologue thereof as depicted in column 7 of Table I, preferably a homologue or functional equivalent as depicted in column 7 of Table I B, and being depicted in the same respective line as said AT1G58360; or
[0312] b) a polypeptide comprising a polypeptide, a consensus sequence or a polypeptide motif as depicted in column 5 of Table II or column 7 of table IV respectively, and being depicted in the same respective line as said AT1G58360 or a functional equivalent or a homologue thereof as depicted in column 7 of Table II preferably a homologue or functional equivalent as depicted in column 7 of Table II B, and being depicted in the same respective line as said AT1G58360,
   as mentioned herein, for the increased tolerance and/or resistance to environmental stress and increased biomass production as compared to a corresponding non-transformed wild type plant.

[0313] Accordingly, in one embodiment, the molecule which activity is to be reduced in the process of the invention is the gene product with an activity described as “amino acid permease (AAP1)”, preferably it is the molecule of section (a) or (b) of this paragraph [0024.1.1.1].

[0314] The sequence of At5g40590 from Arabidopsis thaliana, e.g. as shown incolumn 5 of Table I, has been published in the TAIR database http://www.arabidopsis.org (Huala, E. et al., Nucleic Acids Res. 2001 Vol. 29(1), 102-5), and its activity is described as At5g40590-protein.

[0315] Accordingly, in one embodiment, the process of the present invention comprises the reduction of a gene product with the activity of a “At5g40590-protein” from Arabidopsis thaliana or its functional equivalent or its homolog, e.g. the reduction of
[0316] a) a gene product of a gene comprising the nucleic acid molecule as shown in column 5 of Table I and being depicted in the same respective line as said At5g40590 or a functional equivalent or a homologue thereof as depicted in column 7 of Table I, preferably a homologue or functional equivalent as depicted in column 7 of Table I B, and being depicted in the same respective line as said At5g40590; or
[0317] b) a polypeptide comprising a polypeptide, a consensus sequence or a polypeptide motif as depicted in column 5 of Table II or column 7 of table IV respectively, and being depicted in the same respective line as said At5g40590 or a functional equivalent or a homologue thereof as depicted in column 7 of Table II, preferably a homologue or functional equivalent as depicted in column 7 of Table II B, and being depicted in the same respective line as said At5g40590,
   as mentioned herein, for the increased tolerance and/or resistance to environmental stress and increased biomass production as compared to a corresponding non-transformed wild type plant.

[0318] In one embodiment of the invention the term “increased tolerance and/or resistance to environmental stress” relates to an increased cold resistance, meaning to low temperature tolerance, comprising freezing tolerance and/or chilling tolerance.

[0319] Accordingly, in one embodiment, the molecule which activity is to be reduced in the process of the invention is the gene product with an activity described as “At5g40590-protein”, preferably it is the molecule of section (a) or (b) of this paragraph [0024.1.1.1].

[0320] The sequence of At1g33760 from Arabidopsis thaliana, e.g. as shown incolumn 5 of Table I, has been published in the TAIR database http://www.arabidopsis.org (Huala, E. et al., Nucleic Acids Res. 2001 Vol. 29(1), 102-5), and its activity is described as DNA binding protein/transcription factor.

[0321] Accordingly, in one embodiment, the process of the present invention comprises the reduction of a gene product with the activity of a “DNA binding protein/transcription factor” from Arabidopsis thaliana or its functional equivalent or its homolog, e.g. the reduction of
[0322] a) a gene product of a gene comprising the nucleic acid molecule as shown in column 5 of Table I and being depicted in the same respective line as said At1g33760 or a functional equivalent or a homologue thereof as depicted in column 7 of Table I, preferably a homologue or functional equivalent as depicted in column 7 of Table I B, and being depicted in the same respective line as said At1g33760; or
[0323] b) a polypeptide comprising a polypeptide, a consensus sequence or a polypeptide motif as depicted in column 5 of Table II or column 7 of table IV respectively, and being depicted in the same respective line as said At1g33760 or a functional equivalent or a homologue thereof as depicted in column 7 of Table II , preferably a homologue or functional equivalent as depicted in column 7 of Table II B, and being depicted in the same respective line as said At1g33760,
   as mentioned herein, for the increased tolerance and/or resistance to environmental stress and increased biomass production as compared to a corresponding non-transformed wild type plant.

[0324] Accordingly, in one embodiment, the molecule which activity is to be reduced in the process of the invention is the gene product with an activity described as “DNA binding protein/transcription factor”, preferably it is the molecule of section (a) or (b) of this paragraph [0024.1.1.1].

[0325] The sequence of At4g13430 from Arabidopsis thaliana, e.g. as shown incolumn 5 of Table I, has been published in the TAIR database http://www.arabidopsis.org (Huala, E. et al., Nucleic Acids Res. 2001 Vol. 29(1), 102-5), and its activity is described as hydro-lyase/aconitate hydratase.

[0326] Accordingly, in one embodiment, the process of the present invention comprises the reduction of a gene product with the activity of a “hydro-lyase/aconitate hydratase” from Arabidopsis thaliana or its functional equivalent or its homolog, e.g. the reduction of
[0327] a) a gene product of a gene comprising the nucleic acid molecule as shown in column 5 of Table I and being depicted in the same respective line as said At4g13430 or a functional equivalent or a homologue thereof as depicted in column 7 of Table I, preferably a homologue or functional equivalent as depicted in column 7 of Table I B, and being depicted in the same respective line as said At4g13430; or
[0328] b) a polypeptide comprising a polypeptide, a consensus sequence or a polypeptide motif as depicted in column 5 of Table II or column 7 of table IV respectively, and being depicted in the same respective line as said At4g13430 or a functional equivalent or a homologue thereof as depicted in column 7 of Table II , preferably a homologue or functional equivalent as depicted in column 7 of Table II B, and being depicted in the same respective line as said At4g13430,
   as mentioned herein, for the increased tolerance and/or resistance to environmental stress and increased biomass production as compared to a corresponding non-transformed wild type plant.

[0329] Accordingly, in one embodiment, the molecule which activity is to be reduced in the process of the invention is the gene product with an activity described as “hydro-lyase/aconitate hydratase”, preferably it is the molecule of section (a) or (b) of this paragraph [0024.1.1.1].

[0330] The sequence of At5g66160 from Arabidopsis thaliana, e.g. as shown incolumn 5 of Table I, has been published in the TAIR database http://www.arabidopsis.org (Huala, E. et al., Nucleic Acids Res. 2001 Vol. 29(1), 102-5), and its activity is described as peptidase/ubiquitin-protein ligase/zinc ion binding protein (JR700).

[0331] Accordingly, in one embodiment, the process of the present invention comprises the reduction of a gene product with the activity of a “peptidase/ubiquitin-protein ligase/zinc ion binding protein (JR700)” from Arabidopsis thaliana or its functional equivalent or its homolog, e.g. the reduction of
[0332] a) a gene product of a gene comprising the nucleic acid molecule as shown in column 5 of Table I and being depicted in the same respective line as said At5g66160 or a functional equivalent or a homologue thereof as depicted in column 7 of Table I, preferably a homologue or functional equivalent as depicted in column 7 of Table I B, and being depicted in the same respective line as said At5g66160; or
[0333] b) a polypeptide comprising a polypeptide, a consensus sequence or a polypeptide motif as depicted in column 5 of Table II or column 7 of table IV respectively, and being depicted in the same respective line as said At5g66160 or a functional equivalent or a homologue thereof as depicted in column 7 of Table II , preferably a homologue or functional equivalent as depicted in column 7 of Table II B, and being depicted in the same respective line as said At5g66160,
   as mentioned herein, for the increased tolerance and/or resistance to environmental stress and increased biomass production as compared to a corresponding non-transformed wild type plant.

[0334] Accordingly, in one embodiment, the molecule which activity is to be reduced in the process of the invention is the gene product with an activity described as “peptidase/ubiquitin-protein ligase/zinc ion binding protein (JR700)”, preferably it is the molecule of section (a) or (b) of this paragraph [0024.1.1.1].

[0335] The sequence of At5g02330 from Arabidopsis thaliana, e.g. as shown incolumn 5 of Table I, has been published in the TAIR database http://www.arabidopsis.org (Huala, E. et al., Nucleic Acids Res. 2001 Vol. 29(1), 102-5), and its activity is described as DC1 domain-containing protein/protein-binding protein/zinc ion binding protein.

[0336] Accordingly, in one embodiment, the process of the present invention comprises the reduction of a gene product with the activity of a “DC1 domain-containing protein/protein-binding protein/zinc ion binding protein” from Arabidopsis thaliana or its functional equivalent or its homolog, e.g. the reduction of
[0337] a) a gene product of a gene comprising the nucleic acid molecule as shown in column 5 of Table I and being depicted in the same respective line as said At5g02330 or a functional equivalent or a homologue thereof as depicted in column 7 of Table I, preferably a homologue or functional equivalent as depicted in column 7 of Table I B, and being depicted in the same respective line as said At5g02330; or
[0338] b) a polypeptide comprising a polypeptide, a consensus sequence or a polypeptide motif as depicted in column 5 of Table II or column 7 of table IV respectively, and being depicted in the same respective line as said At5g02330 or a functional equivalent or a homologue thereof as depicted in column 7 of Table II , preferably a homologue or functional equivalent as depicted in column 7 of Table II B, and being depicted in the same respective line as said At5g02330,
   as mentioned herein, for the increased tolerance and/or resistance to environmental stress and increased biomass production as compared to a corresponding non-transformed wild type plant.

[0339] Accordingly, in one embodiment, the molecule which activity is to be reduced in the process of the invention is the gene product with an activity described as “DC1 domain-containing protein/protein-binding protein/zinc ion binding protein”, preferably it is the molecule of section (a) or (b) of this paragraph [0024.1.1.1].

[0340] The sequence of At5g64070 from Arabidopsis thaliana, e.g. as shown incolumn 5 of Table I, has been published in the TAIR database http://www.arabidopsis.org (Huala, E. et al., Nucleic Acids Res. 2001 Vol. 29(1), 102-5), and its activity is described as 1-phosphatidylinositol 4-kinase.

[0341] Accordingly, in one embodiment, the process of the present invention comprises the reduction of a gene product with the activity of a “1-phosphatidylinositol 4-kinase” from Arabidopsis thaliana or its functional equivalent or its homolog, e.g. the reduction of
[0342] a) a gene product of a gene comprising the nucleic acid molecule as shown in column 5 of Table I and being depicted in the same respective line as said At5g64070 or a functional equivalent or a homologue thereof as depicted in column 7 of Table I, preferably a homologue or functional equivalent as depicted in column 7 of Table I B, and being depicted in the same respective line as said At5g64070; or
[0343] b) a polypeptide comprising a polypeptide, a consensus sequence or a polypeptide motif as depicted in column 5 of Table II or column 7 of table IV respectively, and being depicted in the same respective line as said At5g64070 or a functional equivalent or a homologue thereof as depicted in column 7 of Table II , preferably a homologue or functional equivalent as depicted in column 7 of Table II B, and being depicted in the same respective line as said At5g64070,
   as mentioned herein, for the increased tolerance and/or resistance to environmental stress and increased biomass production as compared to a corresponding non-transformed wild type plant.

[0344] Accordingly, in one embodiment, the molecule which activity is to be reduced in the process of the invention is the gene product with an activity described as “1-phosphatidylinositol 4-kinase”, preferably it is the molecule of section (a) or (b) of this paragraph [0024.1.1.1].

[0345] The sequence of At3g55990 from Arabidopsis thaliana, e.g. as shown incolumn 5 of Table I, has been published in the TAIR database http://www.arabidopsis.org (Huala, E. et al., Nucleic Acids Res. 2001 Vol. 29(1), 102-5), and its activity is described as At3g55990-protein.

[0346] Accordingly, in one embodiment, the process of the present invention comprises the reduction of a gene product with the activity of a “At3g55990-protein” from Arabidopsis thaliana or its functional equivalent or its homolog, e.g. the reduction of
[0347] a) a gene product of a gene comprising the nucleic acid molecule as shown in column 5 of Table I and being depicted in the same respective line as said At3g55990 or a functional equivalent or a homologue thereof as depicted in column 7 of Table I, preferably a homologue or functional equivalent as depicted in column 7 of Table I B, and being depicted in the same respective line as said At3g55990; or
[0348] b) a polypeptide comprising a polypeptide, a consensus sequence or a polypeptide motif as depicted in column 5 of Table II or column 7 of table IV respectively, and being depicted in the same respective line as said At3g55990 or a functional equivalent or a homologue thereof as depicted in column 7 of Table II, preferably a homologue or functional equivalent as depicted in column 7 of Table II B, and being depicted in the same respective line as said At3g55990,
   as mentioned herein, for the increased tolerance and/or resistance to environmental stress and increased biomass production as compared to a corresponding non-transformed wild type plant.

[0349] Accordingly, in one embodiment, the molecule which activity is to be reduced in the process of the invention is the gene product with an activity described as “At3g55990-protein”, preferably it is the molecule of section (a) or (b) of this paragraph [0024.1.1.1].

[0350] Homologues (=homologs) of the present gene products, in particular homologues of a gene product which is encoded by or which is comprising a nucleic acid molecule as shown in column 7 of Table I, or a polypeptide comprising the polypeptide, a consensus sequence or a polypeptide motif as shown in column 7 of Table II or IV, can be derived from any organisms as long as the homologue confers the herein mentioned activity, i.e. it is a functional equivalent of said molecules. In particular, the homologue confers an increased tolerance and/or resistance to environmental stress and increased biomass production as compared to a corresponding non-transformed wild type plant after its reduction, repression and/or deletion.

[0351] Further, according to the present invention, the term “homologue” relates to the sequence of an organism having preferably the highest or essentially the highest sequence homology to the herein mentioned or listed sequences of all expressed sequences of said organism.

[0352] The person skilled in the art knows how to find, identify and confirm, that, preferably, a putative homologue has said the:“tolerance and/or resistance to environmental stress and/or biomass production increasing activity”, e.g. as described herein. If known, the biological function or activity in an organism essentially relates or corresponds to the activity or function as described for the genes mentioned in paragraph [0024.1.1.1], for example to at least one of the protein(s) indicated in Table II, Column 5.

[0353] Accordingly, in one embodiment, the homologue or the functional equivalent comprises the sequence of a polypeptide encoded by a nucleic acid molecule comprising a sequence indicated in Table I, Column 7 or a polypeptide sequence, a consensus sequence or a polypeptide motif indicated in Table II or IV, Column 7 or it is the expression product of a nucleic acid molecule comprising a polynucleotide indicated in Table I, Column 7.

[0354] The herein disclosed information about sequence, activity, consensus sequence, polypeptide motifs and tests leads the person skilled in the art to the respective homologous or functional equivalent expression product in an organism.

[0355] In one embodiment, throughout the specification the activity of a protein or polypeptide or a nucleic acid molecule or sequence encoding such protein or polypeptide, e.g. an activity selected from the group consisting of 1-phosphatidylinositol 4-kinase, amino acid permease (AAP1), At3g55990-protein, At5g40590-protein, ATP-dependent peptidase/ATPase/nucleoside-triphosphatase/serine-type endopeptidase, DC1 domain-containing protein/protein-binding protein/zinc ion binding protein, DNA binding protein/transcription factor, hydro-lyase/aconitate hydratase, metalloexopeptidase (MAP1C), methyltransferase, nitrate transporter (ATNRT2.3), nitrate/chlorate transporter (NRT1.1), pectate lyase protein/powdery mildew susceptibility protein (PMR6), peptidase/ubiquitin-protein ligase/zinc ion binding protein (JR700), proton-dependent oligopeptide transport protein, transcription factor, or ubiquitin conjugating enzyme/ubiquitin-like activating enzyme , is an identical or similar activity according to the present invention if it has essentially the same activity or it has at least 10% of the original enzymatic or biological activity, preferably 30% or 40%, particularly preferably 50%, 60% or 70%, most particularly preferably 80%, 85%, 90%, 95% or more of the activity in comparison to a protein as shown in table II, column 5 or 7, more preferably as shown in table II, column 5.

[0356] In one embodiment, the homolog of any one of the polypeptides indicated in Table II, column 5 is derived from an Eukaryote and has a sequence identity of at least 50% and preferably has essentially the same or a similar activity as described in [0024.1.1.1], however its reduction, repression or deletion of expression or activity confers an increased tolerance and/or resistance to environmental stress and increased biomass production as compared to a corresponding non-transformed wild type plant, respectively, in the organisms or a part thereof.

[0357] In one embodiment, the homolog of any one of the polypeptides indicated in Table II, column 5 is derived from a plant, preferably from a plant selected from the group consisting of Nacardiaceae, Asteraceae, Apiaceae, Betulaceae, Boraginaceae, Brassicaceae, Bromeliaceae, Caricaceae, Cannabaceae, Convolvulaceae, Chenopodiaceae, Cucurbitaceae, Elaeagnaceae, Ericaceae, Euphorbiaceae, Fabaceae, Geraniaceae, Gramineae, Juglandaceae, Lauraceae, Leguminosae, Linaceae, perennial grass, fodder crops, vegetables and ornamentals and has a sequence identiy of at least 50% and preferably has essentially the same or a essentially similar activity as described in [0024.1.1.1], however at least its reduction of expression or activity confers an increased tolerance and/or resistance to environmental stress and increased biomass production as compared to a corresponding non-transformed wild type plant. In one embodiment, the homolog of any one of the polypeptides indicated in Table II, column 5 is derived from a crop plant and has a sequence identiy of at least 30% and preferably has essentially the same or a similar activity as described in [0024.1.1.1], however at least an reduction of expression or activity confers an increased tolerance and/or resistance to environmental stress and increased biomass production as compared to a corresponding non-transformed wild type plant.

[0358] Accordingly, in one embodiment, the molecule which activity is to be reduced in the process of the invention is the molecule of (a) or (b) of paragraph [0024.1.1.1], [0025.1.1.1] or of paragraph [00027.1.1.1].

[0359] Thus, a homolog or a functional equivalent of a polypeptide as indicated in Table II, column 3 or column 5 may be a polypeptide encoded by a nucleic acid molecule comprising a polynucleotide as indicated in Table I, column 7 in the same line, or may be a polypeptide comprising a polypeptide indicated in Table II, column 7, or one or more polypeptide motifs indicated in Table IV, column 7, or the consensus sequence as indicated in Table IV, column 7 in the same line as the polypeptide indicated in Table II, column 3 or column 5.

[0360] Thus, a homolog or a functional equivalent of a nucleic acid molecule as indicated in Table I, column 5 may be a nucleic acid molecule encoding a polypeptide comprising a polynucleotide as indicated in Table I, column 7 in the same line, or nucleic acid molecule encoding a polypeptide comprising a polypeptide indicated in Table II, column 7, or the consensus sequence or polypeptide motifs indicated in Table IV, column 7 in the same line as the nucleic acid molecule indicated in Table I, column 3 or column 5.

[0361] Further homologs or functional equivalents of said polypeptide which activity is to be reduced in the process of the present invention are described herein below.

[0362] As consequence of the reduction, repression, decrease or deletion of the translation, transcription and/or expression, e.g. as consequence of the reduced, repressed, decreased or deleted transcription of a gene, in particular of a gene as described herein (e.g. comprising a nucleic acid molecule indicated in column 5 or 7 of Table I), a related phenotypic trait appears such as the enhanced or increased tolerance and/or resistance to environmental stress and increased biomass production as compared to a corresponding non-transformed wild type plant.

[0363] A decreased, repressed or reduced activity of the molecule which activity is to be reduced in the process of the invention manifests itself in an increased tolerance and/or resistance to environmental stress and increased biomass production as compared to a corresponding non-transformed wild type plant.

[0364] In one embodiment, in the process of the invention for increasing the tolerance and/or resistance to environmental stress and increased biomass production as compared to a corresponding non-transformed wild type plant, the process comprises reducing, repressing or deleting the expression or activity of at least one nucleic acid molecule having or encoding a polypeptide having the activity of at least one protein encoded by the nucleic acid molecule as depicted in column 5 of Table I, and wherein the nucleic acid molecule comprises a nucleic acid molecule selected from the group consisting of:
[0365] a) an isolated nucleic acid molecule encoding the polypeptide as depicted in column 5 or 7 of Table II and/or containing a consensus sequence as depicted in column 7 of table IV;
[0366] b) an isolated nucleic acid molecule as depicted in column 5 or 7 of Table I;
[0367] c) an isolated nucleic acid sequence, which, as a result of the degeneracy of the genetic code, can be derived from a polypeptide sequence as depicted in column 5 or 7 of Table II or from a polypeptide containing a consensus sequence as depicted in column 7 of table IV;
[0368] d) an isolated nucleic acid molecule having at least 30%, 40%, 50%, 60%, 70%, 80%, 90%, 95%, 96%. 97%, 98%, 99%, 99.5% or 99.9% identity with the nucleic acid molecule sequence of a polynucleotide comprising the nucleic acid molecule as depicted in column 5 or 7 of Table I;
[0369] e) an isolated nucleic acid molecule encoding a polypeptide having at least 30%, 40%, 50%, 60%, 70%, 80%, 90%, 95%, 96%, 97%, 98%, 99%, 99.5% or 99.9% identity with the amino acid sequence of the polypeptide encoded by the nucleic acid molecule of (a) to (c) and having the activity represented by a protein as depicted in column 5 of Table II;
[0370] f) an isolated nucleic acid molecule encoding a polypeptide which is isolated with the aid of monoclonal or polyclonal antibodies made against a polypeptide encoded by one of the nucleic acid molecules of (a) to (e) and having the activity represented by the protein as depicted in column 5 of Table II;
[0371] g) an isolated nucleic acid molecule encoding a polypeptide comprising the consensus sequence or one or more polypeptide motifs as depicted in the corresponding lane of column 7 of Table IV and preferably having the activity represented by a nucleic acid molecule encoding a polynucleotide as depicted in column 5 of Table I;
[0372] h) an isolated nucleic acid molecule which comprises a polynucleotide, which is obtained by amplifying a cDNA library or a genomic library using primers as depicted in column 7 of Table III and which primers do not start at their 5′-end with with the nucleotides ATA; and preferably said isolated nucleic acid molecule encoding a polypeptide having the activity represented by a polypeptide encoded by a nucleic acid molecule comprising a polynucleotide as depicted in column 5 of Table I;
[0373] i) an isolated nucleic acid molecule encoding a polypeptide having the activity represented by the protein as depicted in column 5 of Table II; and
[0374] j) an isolated nucleic acid molecule which is obtainable by screening a suitable nucleic acid library under stringent hybridization conditions with a probe comprising a complementary sequence of a nucleic acid molecule of (a) or (b) or with a fragment thereof having at least 15, 17, 19, 20, 21, 22, 23, 24, 25 nt or more of a nucleic acid molecule complementary to a nucleic acid molecule sequence characterized in (a) to (d) and encoding a polypeptide having the activity represented by a protein as depicted in column 5 of Table II;
   or which comprises a sequence which is complementary thereto;
   or of a protein encoded by said nucleic acid molecules.

[0375] Accordingly, in one embodiment, the term “molecule which activity is to be reduced in the process of the invention” refers to above nucleic acid molecules comprising at least one of said nucleic acid molecules a) to j) according to this paragraph.

[0376] In one embodiment, said nucleic acid molecule or said polypeptide as depicted in column 5 or 7 of Table I, II or IV is a novel nucleic acid molecule or a novel polypeptide as depicted in column 7 of Table I B or II B.

[0377] A series of mechanisms exists via which the molecule which activity is to be reduced in the process of the invention, e.g. a polypeptide or a nucleic acid molecule, in particular a nucleic acid molecule comprising the nucleic acid molecule as described in column 5 or 7 of Table I or a polypeptide comprising a polypeptide or a consensus sequence as described in column 5 or 7 of Table II or IV respectively, or a functional homolog of said nucleic acid molecule or polypeptide, can be manipulated to directly or indirectly affect the tolerance and/or resistance to environmental stress and biomass production as compared to a corresponding non-transformed wild type plant.

[0378] For example, the molecule number or the specific activity of the polypeptide which activity is to be reduced in the process of the invention or processed by polypeptide which activity is to be reduced in the process of the invention or the molecule number processed by or expressed by the nucleic acid molecule which activity is to be reduced in the process of the invention may be reduced, decreased or deleted.

[0379] However, it is known to the person skilled in the art to reduce, decrease, repress, or delete the expression of a gene which is naturally present in the organisms can be achieved by several ways, for example by modifying the regulation of the gene, or by reducing or decreasing the stability of the mRNA or of the gene product encoded by the nucleic acid molecule which activity is to be reduced, repressed, decreased or deleted in the process of the invention, e.g. of a nucleic acid molecule comprising a polynucleotide as depicted in column 5 or 7 of Table I.

[0380] The term “reduction” of a biological function refers, for example, to the quantitative reduction in a binding capacity or binding strength of a protein to a substrate in an organism, a tissue, a cell or a cell compartment in comparison with the wild type of the same genus and species to which this method has not been applied, under otherwise identical conditions (such as, for example, culture conditions, age of the plants and the like).

[0381] Binding partners for the protein can be identified in the manner with which the skilled worker is familiar, for example by the yeast 2-hybrid system.

[0382] This also applies analogously to the combined reduction, repression, decrease or deletion of the expression of a gene or gene product of the nucleic acid molecule described in column 5 or 7, Table I together with the manipulation of further activities.

[0383] In one embodiment, the reduction, repression, decrease, deletion or modulation according to this invention can be conferred by the (e.g. transgenic) expression of a antisense nucleic acid molecule, an RNAi, a snRNA, a dsRNA, a siRNA, a miRNA, a ta-siRNA, a cosuppression molecule, a ribozyme or of an antibody, an inhibitor or of an other molecule inhibiting the expression or activity of the expression product of the nucleic acid molecule which activity is to be reduced, decreased or deleted in the process of the invention. E.g. the reduction, repression, decrease, deletion or modulation according to this invention can be conferred by the (e.g. transgenic) expression of a nucleic acid molecule comprising a polynucleotide encoding antisense nucleic acid molecule, RNAi, snRNA, dsRNA, siRNA, miRNA, ta-siRNA, a cosuppression molecule, ribozyme or of an antibody Against the nucleic acid molecule or the polypeptide which activity is to be reduced in the process of the invention.

[0384] In a further embodiment, the reduction, repression, decrease, deletion or modulation according to this invention can be to a stable mutation in the corresponding endogenous gene encoding the nucleic acid molecule to be reduced, decreased or deleted in the process of the invention, e.g. of a nucleic acid molecule comprising a polynucleotide as depicted in column 5 or 7 of Table I.

[0385] In another embodiment, the reduction, repression, decrease, deletion or modulation according to this invention can be a modulation of the expression or of the behaviour of a gene conferring the expression of the polypeptide to be reduced, decreased, repressed or deleted according to the process of the invention, e.g. of a polypeptide comprising a polypeptide, a consensus sequence or a polypeptide motif as depicted in column 5 or 7 of Table II or IV

[0386] Said expression may be constitutive, e.g. due to a stable, permanent, systemic, local or temporal expression, for example limited to certain cell types, tissues organs or time periods.

[0387] For example, the reduction, repression, decrease, deletion or modulation according to this invention can be transient, e.g. due to an transient transformation, a transiently active promoter or temporary addition of a modulator, such as an antagonist, inhibitor or inductor, e.g. after transformation with an inducible construct carrying the double-stranded RNA nucleic acid molecule (dsRNA), antisense, RNAi, snRNA, siRNA, miRNA, ta-siRNA, a cosuppression molecule, ribozyme, antibody etc. as described herein, for example under control of an inducible promoter combined with the application of a corresponding inducer, e.g. tetracycline or ecdysone.

[0388] The reduction, decrease or repression of the activity of the molecule which activity is reduced according to the process of the invention amounts preferably by at least 10%, preferably by at least 30% or at least 60%, especially preferably by at least 70%, 80%, 85%, 90% or more, very especially preferably are at least 95%, more preferably are at least 99% or more in comparison to the control, reference or wild type. Most preferably the reduction, decrease, repression or deletion in activity amounts to 100%.

[0389] Various strategies for reducing the quantity, the expression, the activity or the function of proteins encoded by the nucleic acids or the nucleic acid sequences themselves according to the invention are encompassed in accordance with the invention. The skilled worker will recognize that a series of different methods are available for influencing the quantity of a protein, the activity or the function in the desired manner.

[0390] Accordingly, in one embodiment, the process of the present invention comprises one or more of the following steps:
[0391] i) Inhibition, repression, inactivation or reduction of translation or transcription of,
[0392] ii) Destabilization of transcript stability or polypeptide stability of,
[0393] iii) Reduction of accumulation of,
[0394] iv) Inhibition, repression, inactivation or reduction of activity of transcript or polypeptide of, and/or
[0395] v) Reduction of the copy number of functional (e.g. expressed) genes of,
   a suitable compound, for example, of
[0396] a) a protein enabling, mediating or controlling the expression of a protein encoded by the nucleic acid molecule which activity is reduced in the process of invention or of the polypeptide which activity is reduced in the process of the invention, e.g. of a polypeptide comprising a polypeptide, a consensus sequence or a polypeptide motif as depicted in column 5 or 7, of Table II or IV or being enoded by a nucleic acid molecule comprising a polynucleotide as depicted in column 5 or 7, of Table I;
[0397] b) a mRNA molecule enabling, mediating or controlling the expression of a protein to be reduced in the process of the invention or being encoded by the nucleic acid molecule which activity is reduced in the process of the invention, e.g. enabling, mediating or controlling the expression of a polypeptide comprising a polypeptide, a consensus sequence or a polypeptide motif as depicted in column 5 or 7, of Table II or IV, or of a polypeptide being encoded by a nucleic acid molecule comprising a polynucleotide as depicted in column 5 or 7, of Table I,
[0398] c) an RNA molecule enabling, mediating or controlling the expression of a mRNA encoding a polypeptide which activity is reduced in the process of the invention, e.g. of a mRNA encoding a polypeptide comprising a polypeptide, a consensus sequence or a polypeptide motif as depicted in column 5 or 7, of Table II or IV, or of a mRNA comprising the nucleic acid molecule which activity is reduced in the process of the invention, e.g. comprising a polynucleotide as depicted in column 5 or 7, of Table I;
[0399] d) an RNA molecule enabling, mediating or controlling the expression of an expression product of a nucleic acid molecule comprising the polynucleotide which activity is reduced in the process of the invention; e.g. of a nucleic acid molecule comprising a polynucleotide as depicted in column 5 or 7, of Table I;
[0400] e) a mRNA encoding the polynucleotide or the polypeptide which activity is reduced in the process of the invention; e.g. of a nucleic acid molecule comprising a polynucleotide as depicted in column 5 or 7, of Table I or of a mRNA enabling, mediating or controlling the expression of a polypeptide which activity is reduced in the process of the invention, the polypeptide depicted in column 5 or 7, of Table II or IV;
[0401] f) a gene encoding an activator enabling the activation or increase of the expression of a nucleic acid molecule encoding a polypeptide encoded by the nucleic acid molecule which activity is reduced in the process of the invention or the polypeptide which activity is to be reduced in the process of the invention, e.g. a gene encoding an activator enabling the activation or increase of the expression of a polypeptide comprising a polypeptide, a consensus sequence or a polypeptide motif as depicted column 5 or 7, of Table II or IV or of a nucleic acid molecule comprising a polynucleotide as depicted in column 5 or 7, of Table I; or
[0402] g) an endogenous gene encoding the polypeptide or the nucleic acid molecule which activity is reduced in the process of the invention, for example an endogenous gene encoding a polypeptide comprising a polypeptide, a consensus sequence or a polypeptide motif as depicted column 5 or 7, of Table II or IV, or a nucleic acid molecule comprising a polynucleotide as depicted in column 5 or 7, of Table I;

[0403] Accordingly, the
[0404] i) Inhibition, repression, inactivation or reduction of translation or transcription,
[0405] ii) Destabilization transcript stability or polypeptide stability,
[0406] iii) Reduction of accumulation,
[0407] iv) Inhibition, repression, inactivation or reduction of activation of transcript or polypeptide, and/or
[0408] v) reducing the copy number of functional (e.g. expressed) genes,
   can for example be mediated e.g. by adding or expressing an antisense molecule, cosuppression molecule, an antibody, ribozyme, siRNA, microRNA, ta-siRNA, a cosuppression molecule, or RNAi, by mutation or deletion of a gene sequence, expressing or improving the activity of a negative expression element or by other methods known to the person skilled in the art or mentioned herein. A polynucleotide, which activity is to be reduced in the process of the invention or one or more fragments thereof, can for example be expressed in antisense orientation. In another embodiment, a hairpin RNAi constructs is expressed. It is also advantageous to express simultaneously a sense and antisense RNA molecule of the nucleic acid molecule or polypeptide which activity is to be reduced in the process of the invention.

[0409] For example, in an embodiment of the present invention, the present invention relates to a process, wherein the number of functional (e.g. expressed) copies of a gene encoding the polynucleotide or nucleic acid molecule of the invention is decreased.

[0410] Further, the endogenous level of the polypeptide of the invention can for example be decreased by modifying the transcriptional or translational regulation or efficiency of the polypeptide.

[0411] Details are described later in the description or in the examples

[0412] In one embodiment, the process of the present invention comprises for example one or more of the following steps
[0413] a) stabilizing a protein conferring the decreased expression of a protein of the nucleic acid molecule or polypeptide which activity is reduced in the process of the invention;
[0414] b) stabilizing a mRNA or functional RNA conferring the decreased expression of a of the nucleic acid molecule or polypeptide which activity is reduced in the process of the invention;
[0415] c) increasing or stimulating the specific activity of a protein conferring the decreased expression of a of the nucleic acid molecule or polypeptide which activity is reduced in the process of the invention;
[0416] d) decreasing the specific activity of a protein conferring the increased expression of a of the nucleic acid molecule or polypeptide which activity is reduced in the process of the invention;
[0417] e) expressing a transgenic gene encoding a protein conferring the decreased expression of a nucleic acids molecule or polypeptide which activity is reduced in the process of the invention,
[0418] f) generating or increasing the expression of an endogenous or artificial transcription factor repressing the expression of a protein conferring the increased expression of the nucleic acid molecule or polypeptide which activity is reduced in the process of the invention;
[0419] g) generating or increasing the expression of an endogenous or artificial transcription factor mediating the expression of a protein conferring the decreased expression of the nucleic acid molecule or polypeptide which activity is reduced in the process of the invention;
[0420] h) reducing, repressing or deleting the expression of an endogenous or artificial transcription factor repressing the expression of a protein conferring the decreased expression of the nucleic acid molecule or polypeptide which activity is reduced in the process of the invention;
[0421] i) reducing, repressing or deleting the expression of an endogenous or artificial transcription factor mediating the expression of a protein conferring the increased expression of the nucleic acid molecule or polypeptide which activity is reduced in the process of the invention;
[0422] j) increasing the number of functional copies or expression of a gene conferring the decreased expression of the nucleic acid molecule or polypeptide which activity is reduced in the process of the invention,
[0423] k) increasing the activity of a repressor protein or a repressor RNA
[0424] l) Increasing the activity of a protein or RNA leading to a dominant negative pheno-type of the protein which activity is reduced in the process of the invention;
[0425] m) expression of an antibody or aptamer, which binds to the nucleic acid molecule which activity is to be reduced in the process of the invention or the protein which activity is reduced in the process of the invention and thereby reducing, decreasing or deleting its activity;
[0426] n) expressing a repressor conferring the reduced, repressed, decreased or deleted expression of a protein encoded by the nucleic acid to be reduced in the process molecule of the invention or of the polypeptide which activity is reduced in the process of the invention, or increasing the inhibitory regulation of the polypeptide of the invention;
[0427] o) reducing or deleting the expression of the nucleic acid molecule which activity is reduced in the process of the invention or the polypeptide which activity is reduced in the process of the invention by adding one or more exogenous repression factors such as a inhibiting chemical compound to the organism or its medium or its feed, e.g. to the organism's water supply; or
[0428] p) modulating growth conditions of an organism in such a manner, that the expression or activity of a nucleic acid molecule encoding the protein which activity is reduced in the process of the invention or the protein itself is reduced, repressed, decreased or deleted. This can be achieved by e.g modulating light and/or nutrient conditions, which in terms modulated the expression of the gene or protein which activity is reduced in the process of the invention.

[0429] Others strategies and modifications and combinations of above strategies are well known to the person skilled in the art and are also embodiment of this invention. Above said can for example be achieved by adding positive expression or removing negative expression elements, e.g. homologous recombination can be used to either introduce positive or negative regulatory elements, like a 35S enhancer into a plant promoter, or to remove repressor elements from regulatory regions. Further gene conversion methods can be used to disrupt elements or to enhance the activity of repressor elements. Repressor elements can be randomly introduced in plants by T-DNA or transposon mutagenesis. Lines can be identified in which the repressor elements are integrated near to a gene encoding the nucleic acid molecule or polypeptide which activity is to be reduced in the process of the invention, the expression of which is thereby reduced, repressed or deleted. Furthermore mutations like point mutations can be introduced randomly by different mutagenesis methods and can be selected by specific methods such like TILLING (reviewed in Slade and Knauf, Transgenic Res. 2005, 14(2), 109-115).

[0430] For example, an increase of the activity of a protein or RNA leading to a dominant negative phenotype of the protein which activity is reduced in the process of the invention can be achieved through the expression of a nucleic acid molecule encoding a protein, which has lost its biological activity but which binds to another protein in a multimeric complex thereby decreasing, repressing or deleting the activity of said complex or which binds for example as a transcription factor to DNA and thereby decreasing or deleting the activity of the translated protein.

[0431] In general, the amount of mRNA, polynucleotide or nucleic acid molecule in a cell or a compartment of an organism correlates to the amount of encoded protein and thus with the overall activity of the encoded protein in said volume. Said correlation is not always linear, the activity in the volume is dependent on the stability of the molecules, the degradation of the molecules or the presence of activating or inhibiting co-factors. Further, product and educt inhibitions of enzymes are well known.

[0432] The activity of the abovementioned proteins and/or polypeptide encoded by the nucleic acid molecule to be reduced in the process of the present invention can be reduced, repressed, decreased or deleted in various ways.

[0433] For example, the activity in an organism or in a part thereof, like a cell, is reduced, repressed or decreased via reducing or decreasing the gene product number, e.g. by reducing, repressing or decreasing the expression rate, like mutating the natural promoter to a lower activity, or by reducing, repressing or decreasing the stability of the mRNA expressed, thus reducing, repressing or decreasing the translation rate, and/or reducing, repressing or decreasing the stability of the gene product, thus increasing the proteins decay. Further, the activity or turnover of enzymes or channels or carriers, transcription factors, and similar active proteins can be influenced in such a manner that a reduction of the reaction rate or a modification (reduction, repression, decrease or deletion) of the affinity to the substrate results, is reached.

[0434] A mutation in the catalytic centre of a polypeptide or nucleic acid molecule which activity is reduced in the process of the invention, e.g. of an enzyme or a catalytic or regulatory RNA, can modulate the turn over rate of the enzyme, e.g. a knock out of an essential amino acid can lead to a reduced or complete knock out of the activity of the enzyme, or the deletion of regulator binding sites can reduce a positive regulation.

[0435] The specific activity of an enzyme of the present invention can be decreased such that the turn over rate is decreased or the binding of a co-factor is reduced. Reducing the stability of the encoding mRNA or the protein can also decrease the activity of a gene product. The reduction of the activity is also under the scope of the term “reduced, repressed, decreased or deleted activity”. Besides this, advantageously the reduction of the activity in cis, eg. mutating the promoter including other cis-regulatory elements, or the transcribed or coding parts of the gene, inhibition can also be achieved in trans, eg. by transfactors like chimeric transcription factor, ribozymes, antisense RNAs, dsRNAs or dominant negative protein versions, which interfere with various stages of expression, eg the transcription, the translation or the activity of the protein or protein complex itself. Also epigenetic mechanisms like DNA modifications, DNA methylation, or DNA packaging might be recruited to inactivate or down regulate the nucleic acids of the invention or the encoded proteins.

[0436] Accordingly, the increase of tolerance and/or resistance to environmental stress and increased biomass production as compared to a corresponding non-transformed wild type plant in a non-human organism is in one embodiment achieved through the use of an RNA interference (dsRNAi), the introduction of an antisense nucleic acid, RNAi, snRNA, siRNA, miRNA, ta-siRNA, cosuppression molecule, or a ribozyme nucleic acid combined with an ribozyme, a nucleic acid encoding a cosuppressor, a nucleic acid encoding a dominant negative protein, DNA- or protein-binding factor or antibodies targeting said gene or -RNA or -proteins, RNA degradation inducing viral nucleic acids or a micro RNA molecule or combinations thereof against the nucleic acid molecule characterized in this paragraph.

[0437] The regulation of the abovementioned nucleic acid sequences may be modified so that gene expression is decreased. This reduction, repression, decrease or deletion (reduction, repression, decrease, deletion, inactivation or down-regulation shall be used as synonyms throughout the specification) can be achieved as mentioned above by all methods known to the skilled person, preferably by double-stranded RNA interference (dsRNAi), introduction of an antisense nucleic acid, a ribozyme, an antisense nucleic acid combined with a ribozyme, a nucleic acid encoding a cosuppressor, a nucleic acid encoding a dominant negative protein, DNA- or protein-binding factor or antibodies targeting said gene or -RNA or -proteins, RNA degradation inducing viral nucleic acids and expression systems, systems for inducing a homolog recombination of said genes, mutations in said genes or a combination of the above.

[0438] In general, an activity of a gene product in an organism or part thereof, in particular in a plant cell, a plant, or a plant tissue or a part thereof or in a microorganism can be decreased by decreasing the amount of the specific encoding mRNA or the corresponding protein in said organism or part thereof. “Amount of protein or mRNA” is understood as meaning the molecule number of polypeptides or mRNA molecules in an organism, a tissue, a cell or a cell compartment. “Decrease” in the amount of a protein means the quantitative decrease of the molecule number of said protein in an organism, a tissue, a cell or a cell compartment or part thereof—for example by one of the methods described herein below—in comparison to a wild type, control or reference.

[0439] In this context, “inactivation” means that the activity of the polypeptide encoded is essentially no longer detectable in the organism or in the cell such as, for example, within the plant or plant cell. For the purposes of the invention, downregulation (=reduction) means that its activity, e.g. the enzymatic or biological activity of the polypeptide encoded is partly or essentially completely reduced in comparison with the activity of the untreated organism. This can be achieved by different cell-biological mechanisms. In this context, the activity can be downregulated in the entire organism or, in the case of multi-celled organisms, in individual parts of the organism, in the case of plants for example in tissues such as the seed, the leaf, the root or other parts.

[0440] A modification, i.e. a decrease, can be caused by endogenous or exogenous factors. For example, a decrease in activity in an organism or a part thereof can be caused by adding a chemical compound such as an antagonist to the media, nutrition, soil of the plants or to the plants themselves.

[0441] In one embodiment the increase in the tolerance and/or resistance to environmental stress and increased biomass production as compared to a corresponding non-transformed wild type plant can be achieved by decreasing the level of the endogenous nucleic acid molecule or the endogenous polypeptide described herein, i.e. of the nucleic acid molecule or the polypeptide which activity is to be reduced according to the process of the invention, in particular of a polynucleotide or polypeptide described in the corresponding line of Table I or II, column 5 or 7, respectively.

[0442] Accordingly, in one further embodiment of the process of the invention the reduction, repression or deletion of the activity represented by the protein or nucleic acid molecule to be reduced in the process of the invention is achieved by at least one step selected from the group consisting of:
[0443] a) introducing a nucleic acid molecule comprising a polynucleotide encoding a ribonucleic acid sequence, which is able to form a double-stranded ribonucleic acid molecule, whereby a fragment of at least 17, 18, 19, 20, 21, 22, 23, 24 or 25 nucleotides (nt) or more, preferably of 25, 26, 27, 28, 29, 30, 31, 32, 33, 34, 35, 36, 37, 38, 39 or 40 nucleotides (nt) or more, more preferably of 50, 60, 70, 80, 90 or 100 nucleotides (nt) or more and whereby said double-stranded ribonucleic acid molecule has an identity of 50% or more, preferably an identity of 60, 65, 70, 75, 80, 85, 90, 95, 97, 98, 99 or most preferred of 100% to the nucleic acid molecule to be reduced according to the process of the invention or a nucleic acid molecule encoding the polypeptide to be reduced according to the process of the invention or selected from the group consisting of:
   [0444] aa) the nucleic acid molecule which activity is reduced in the process of the present invention;
   [0445] ab) a nucleic acid molecule comprising a polynucleotide as depicted in column 5 or 7 of Table I or encoding a polypeptide comprising a polypeptide as depicted in column 5 or 7 of Table II, preferably, a nucleic acid molecule as depicted in column 5 or 7 of Table I or encoding a polypeptide as depicted in column 5 or 7 of Table II, preferably a nucleic acid molecule as depicted in column 5 or 7 of Table I A or encoding a polypeptide as depicted in column 5 or 7 of Table II B, and
   [0446] ac) a nucleic acid molecule encoding a polypeptide having the activity of polypeptide depicted in column 5 of Table II or encoding the expression product of a polynucleotide comprising a nucleic acid molecule as depicted in column 5 or 7 of Table I; and
[0447] b) anyone of the steps disclosed in following paragraph:
[0448] a) introducing an RNAi, snRNA, dsRNA, siRNA, miRNA, ta-siRNA, cosuppression molecule, or an antisense nucleic acid molecule, whereby the RNAi, snRNA, dsRNA, siRNA, miRNA, ta-siRNA, cosuppression molecule,or antisense nucleic acid molecule comprises a fragment of 17, 18, 19, 20, 21, 22, 23, 24 or 25 nucleotides (nt) or more, preferably of 25, 26, 27, 28, 29, 30, 31, 32, 33, 34, 35, 36, 37, 38, 39 or 40 nucleotides (nt) or more, more preferably of 50, 60, 70, 80, 90 or 100 nucleotides (nt) or more with an identity of at least 30% or more, preferably of 40, 50, 60, 65, 70, 75, 80, 85, 90, 95, 97, 98, 99 or most preferably of 100% to the nucleic acid molecule to be reduced according to the process of the invention or a nucleic acid molecule encoding the polypeptide to be reduced according to the process of the invention or to a nucleic acid molecule selected from a group defined in section (aa) to (ac);
[0449] b) introducing of a ribozyme which specifically cleaves the nucleic acid molecule to be reduced according to the process of the invention or a nucleic acid molecule encoding the polypeptide to be reduced according to the process of the invention or a nucleic acid molecule selected from a group defined in section (aa) to (ac);
[0450] c) introducing the RNAi, snRNA, dsRNA, siRNA, miRNA, ta-siRNA, cosuppression molecule, ribozyme, antibody, antisense nucleic acid molecule characterized in (a) and the ribozyme characterized in (b);
[0451] d) introducing of a sense nucleic acid molecule conferring the expression of the nucleic acid molecule to be reduced according to the process of the invention or a nucleic acid molecule encoding the polypeptide to be reduced according to the process of the invention or of a nucleic acid molecule selected from a group defined in section (aa) to (ac) for inducing a co-suppression of the endogenous expression product of the nucleic acid molecule to be reduced according to the process of the invention or a nucleic acid molecule encoding the polypeptide to be reduced according to the process of the invention or of a nucleic acid molecule selected from a group defined in section (aa) to (ac);
[0452] e) introducing a nucleic acid molecule comprising a polynucleotide conferring the expression of a dominant-negative mutant of a protein having the activity of a protein to be reduced according to the process of the invention or of a protein encoded by a nucleic acid molecule to be reduced according to the process of the invention or of a protein encoded by a nucleic acid molecule selected from a group defined in section (aa) to (ac);
[0453] f) introducing a nucleic acid molecule comprising a polynucleotide encoding a factor, which binds to a nucleic acid molecule comprising the nucleic acid molecule to be reduced according to the process of the invention or comprising a nucleic acid molecule encoding the polypeptide to be reduced according to the process of the invention or comprising a nucleic acid molecule selected from a group defined in section (aa) to (ac);
[0454] g) introducing a viral nucleic acid molecule conferring the decline of a RNA molecule comprising the nucleic acid molecule to be reduced according to the process of the invention or comprising a nucleic acid molecule encoding the polypeptide to be reduced according to the process of the invention or comprising a nucleic acid molecule selected from a group defined in section (aa) to (ac);
[0455] h) introducing a nucleic acid construct capable to recombinate with and silence, inactivate, repress or reduce the activity of an endogenous gene comprising the nucleic acid molecule to be reduced according to the process of the invention or comprising a nucleic acid molecule encoding the polypeptide to be reduced according to the process of the invention or comprising a nucleic acid molecule selected from a group defined in section (aa) to (ac);
[0456] i) introducing a non-silent mutation in an endogenous gene comprising the nucleic acid molecule to be reduced according to the process of the invention or comprising a nucleic acid molecule encoding the polypeptide to be reduced according to the process of the invention or comprising a nucleic acid molecule selected from a group defined in section (aa) to (ac); and/or
[0457] j) introducing an expression construct conferring the expression of nucleic acid molecule characterized in any one of (a) to (i).

[0458] Accordingly, in one further embodiment of the process of the invention the reduction or deletion of the activity represented by the protein or nucleic acid molecule used in the process of the invention is achieved by at least one step selected from the group consisting of:
[0459] a) introducing of nucleic acid molecules encoding a ribonucleic acid molecule, which sequence is able to form a double-stranded ribonucleic acid molecule, whereby the sense strand of said double-stranded ribonucleic acid molecules has a identity of at least 30%, preferably of 60, 65, 70, 75, 80, 85, 90, 95, 97, 98, 99 or 100% to the nucleic acid molecule to be reduced according to the process of the invention or a nucleic acid molecule encoding the polypeptide to be reduced according to the process of the invention or to a nucleic acid molecule selected from the group consisting of:
   [0460] i) a nucleic acid molecule conferring the expression of a protein comprising a polypeptide, a consensus sequence or a polypeptide motif, as depicted in column 5 or 7 of Table II or IV or conferring the expression of nucleic acid molecule comprising a polynucleotide as depicted in column 5 or 7 of Table I;
   [0461] ii) a nucleic acid molecule encoding a protein having the activity of a protein to be reduced according to the process of the invention, e.g. comprising a polypeptide, a consensus sequence or a polypeptide motif as depicted in column 5 or 7 of Table II or IV or conferring the expression of nucleic acid molecule comprising a polynucleotide as depicted in column 5 or 7 of Table I; and
   [0462] iii) a nucleic acid molecule comprising a fragment of at least 17, 18, 19, 20, 21, 22, 23, 24 or 25 base pairs of a nucleic acid molecule with a homology of at least 50% preferably of 60, 65, 70, 75, 80, 85, 90, 95, 97, 98, 99 or 100% to a nucleic acid molecule of (i) or (ii);
[0463] b) introducing an antisense nucleic acid molecule, whereby the antisense nucleic acid molecule has an identity of at least 30% or more, preferably of 40, 50, 60, 65, 70, 75, 80, 85, 90, 95, 97, 98, 99 or 100% to a nucleic acid molecule antisense to the nucleic acid molecule to be reduced according to the process of the invention or a nucleic acid molecule encoding the polypeptide to be reduced according to the process of the invention or a nucleic acid molecule selected from the group consisting of (i) to (iii) above;
[0464] c) introducing of a ribozyme which specifically cleaves a nucleic acid molecule conferring the expression of a protein having the activity of a protein to be reduced according to the process of the invention, e.g. comprising a polypeptide, a consensus sequence or a polypeptide motif as depicted in column 5 or 7 of Table II or IV, or which specifically cleaves a nucleic acid molecule conferring the expression of the nucleic acid molecule to be reduced according to the process of the invention or the polypeptide to be reduced according to the process of the invention or a nucleic acid molecule encoding the polypeptide to be reduced according to the process of the invention or a nucleic acid molecule selected from the group consisting of (i) to (iii) above;
[0465] d) introducing of the antisense nucleic acid molecule characterized in (b) and the ribozyme characterized in (c);
[0466] e) introducing of a sense nucleic acid molecule conferring the expression of the nucleic acid molecule to be reduced according to the process of the invention or the polypeptide to be reduced according to the process of the invention or a nucleic acid molecule encoding the polypeptide to be reduced according to the process of the invention or a nucleic acid molecule selected from the group consisting of (i) to (iii) above for inducing a co-suppression of the endogenous the nucleic acid molecule to be reduced according to the process of the invention or a nucleic acid molecule encoding the polypeptide to be reduced according to the process of the invention or a nucleic acid molecule selected from the group consisting of (i) to (iii) above;
[0467] f) introducing a nucleic acid molecule conferring the expression of a dominant-negative mutant of a protein having the activity of a protein to be reduced according to the process of the invention, e.g. comprising a polypeptide, a consensus sequence or a polypeptide motif as depicted in column 5 or 7 of Table II or IV or of a dominant-negative mutant of a polypeptide encoded by a nucleic acid molecule selected from the group consisting of (i) to (iii) above, for example expressing said sequence leading to the dominant-negative mutant protein thereby the activity of the protein used in the inventive process is reduced, decreased or deleted;
[0468] g) introducing a nucleic acid molecule encoding a factor, which binds to a nucleic acid molecule conferring the expression of a protein having the activity of a polypeptide to be reduced according to the process of the invention, e.g. comprising a polypeptide, a consensus sequence or a polypeptide motif as depicted in column 5 or 7 of Table II or IV or being encoded by a nucleic acid molecule selected from the group consisting of (i) to (iii) above;
[0469] h) introducing a viral nucleic acid molecule conferring the decline of a RNA molecule conferring the expression of a protein having the activity of a protein used in the process of the invention, especially a polypeptide comprising a polypeptide, a consensus sequence or a polypeptide motif as depicted in column 5 or 7 of Table II or IV or being encoded by a nucleic acid molecule selected from the group consisting of (i) to (iii) above;
[0470] i) introducing a nucleic acid construct capable to recombinate with and mutate an endogenous gene conferring the expression of a protein having the activity of a protein used in the inventive process especially a polypeptide comprising a polypeptide, a consensus sequence or a polypeptide motif as depicted in column 5 or 7 of Table II or IV or being encoded by a nucleic acid molecule selected from the group consisting of (i) to (iii) above;
[0471] j) introducing a non-silent mutation in an endogenous gene conferring the expression of a protein having the activity of a protein used in the inventive process especially a polypeptide comprising a polypeptide, a consensus sequence or a polypeptide motif as depicted in column 5 or 7 of Table II or IV or being encoded by a nucleic acid molecule selected from the group consisting of (i) to (iii) above;
[0472] k) selecting of a non-silent mutation in a nucleic acid sequence encoding a protein having the activity of a protein used in the inventive process especially a polypeptide comprising a polypeptide, a consensus sequence or a polypeptide motif as depicted in column 5 or 7 of Table II or IV or being encoded by a nucleic acid molecule selected from the group consisting of (i) to (iii) above from a randomly mutagenized population of organisms used in the inventive process; and/or
[0473] l) introducing an expression construct conferring the expression of a nucleic acid molecule or polypeptide as characterized in any one of (a) to (k) or conferring the expression of a nucleic acid molecule or polypeptide characterized in any one of (a) to (k).

[0474] In one embodiment, the process of the present invention comprises the following step:
[0475] introducing into an endogenous nucleic acid molecule, e.g. into an endogenous gene, which confers the expression of a polypeptide comprising a polypeptide, a consensus sequence or a polypeptide motif as depicted in column 5 or 7 of Table II or IV or a polypeptide being encoded by a nucleic acid molecule selected from the group consisting of (i) to (iii) mentioned above, a mutation of a distinct amino acid shown in the consensus sequence depicted in column 7 of Table IV in the same line,

[0476] whereby the mutation confers a non-silent mutation in the polypeptide which activity is to be reduced in the process of the invention, in particular in a polypeptide comprising a polypeptide, a consensus sequence or a polypeptide motif as depicted in column 5 or 7 of Table II or IV or a polypeptide being encoded by a nucleic acid molecule selected from the group consisting of (i) to (iii), mentioned above.

[0477] The consensus sequence depicted in column 7 of Table IV indicates the amino acids which were found to be strongly conserved within the sequences of the polypeptides depicted in columns 5 and 7 of Table II. Thus, it is preferred to mutate one or more of the distinct conserved amino acids (not defined as X or Xaa) by a random mutation approach or by selectively introducing a mutation into such a amino acid or into a stretch of several conserved amino acids, for example via applying a chemical, physical or biological mutagens such as site directed mutagenesis or introducing a homologous recombination.

[0478] In one embodiment, the coding sequences of a nucleic acid molecule which activity is to be reduced in the process of the invention, in particular from the nucleic acid molecule mentioned under sections (a) to (i) of paragraph [0030.1.1.1], preferably of a nucleic acid molecule comprising a nucleic acid molecule as depicted in column 5 or 7 of Table I, is used for the reduction, repression, decrease or deletion of the nucleic acid sequences which activity is to be reduced in the process of the invention according to the different process steps (a) to (l) mentioned above in paragraphs [0052.1.1.1] to [0053.1.1.1], e.g. as described in Liu Q et al (2002) High-Stearic and High-Oleic Cottonseed Oils Produced by Hairpin RNA-Mediated Post-Transcriptional Gene Silencing. Plant Physiology 129 pp 1732-1743.

[0479] Preferably less than 1000 bp, 900 bp, 800 bp or 700 bp, particular preferably less than 600 bp, 500 bp, 400 bp, 300 bp, 200 bp or 100 bp of the coding region of the said nucleic acid sequence are used.

[0480] The skilled person knows that it is possible starting from the nucleic acid sequences disclosed herein as the nucleic acid molecule which activity is to be reduced in the process of the invention to reduce or delete the activity particularly of orthologs of the molecules disclosed herein. In particular, the skilled person knows how to isolate the complete gene, the coding region (CDR), the expressed regions (e.g. as cDNA), or fragments thereof of said nucleic acid sequences, in particular said regions of molecules as indicated in Table I, column 5 or 7, if not already disclosed herein, e.g. starting from the nucleic acid molecule mentioned under sections (a) to (j) of paragraph [0030.1.1.1] above, preferably starting from a nucleic acid molecule comprising a nucleic acid molecule as depicted in column 5 or 7 of Table I.

[0481] In one embodiment, the 5′- and/or 3′-sequences of a nucleic acid molecule which activity is to be reduced in the process of the invention, in particular from the nucleic acid molecule mentioned under sections (a) to (i) of paragraph [0030.1.1.1], preferably of a nucleic acid molecule comprising a nucleic acid molecule as depicted in column 5 or 7 of Table I, is used for the reduction, repression, decrease or deletion of the nucleic acid sequences which activity is to be reduced in the process of the invention according to the different process steps (a) to (j) mentioned above in paragraphs [0052.1.1.1] to [0053.1.1.], e.g. as described in Ifuku K et al (2003) Specific Interference in psbP Genes Encoded by a Multigene Family in Nicotiana tabacum with Short 3′-Untranslated Sequence. Biosci. Biotechnol. Biochem., 67 (1) pp 107-113.

[0482] Preferably less than 1000 bp, 900 bp, 800 bp or 700 bp, particular preferably less than 600 bp, 500 bp, 400 bp, 300 bp, 200 bp or 100 bp of the 5′- and/or 3′-region of the said nucleic acid sequence are used.

[0483] The skilled person knows that it is possible starting from the nucleic acid sequences disclosed herein as the nucleic acid molecule which activity is to be reduced in the process of the invention to isolate the UTRs of said molecules. In particular, the skilled person knows how to isolate the 5′- and/or 3′-regions of said nucleic acid sequences, in particular the 5′- and/or 3′-regions of the molecules indicated in Table I, column 5 or 7, if not already disclosed herein, e.g. starting from the nucleic acid molecule mentioned under sections (a) to (j) of paragraph [0030.1.1.1] above, preferably starting from a nucleic acid molecule comprising a nucleic acid molecule as depicted in column 5 or 7 of Table I.

[0484] 5′- and 3′-regions can be isolated by different methods like RACE (Zang and Frohman (1997) Using rapid amplification of cDNA ends (RACE) to obtain full length cDNAs. Methods Mol Biol 1997; 69:61-87 or genomic walking PCR technologies (Mishra et al., 2002, Biotechniques 33(4): 830-832; Spertini et al 1999, Biotechniques 27(2), 308-314).

[0485] The aforementioned process steps of the reduction or deletion of the biological activity represented by the protein of the invention lead to an increase of tolerance and/or resistance to environmental stress and increased biomass production as compared to a corresponding non-transformed wild type plant.

[0486] A reduction in the activity or the function is preferably achieved by a reduced expression of a gene encoding the protein of the inventive process.

[0487] In a preferred embodiment of the process of the invention, said reduction of the activity or function of the activity of a gene product encoding the nucleic acid molecule or the polypeptide to be reduced according to the process of the invention, e.g. a polypeptide encoded by nucleic acid molecules comprising the nucleic acid molecules shown in column 5 or 7 of Table I or a polypeptide comprising the amino acid sequences, consensus sequences or polypeptide motifs shown in column 5 or 7 of Table II or in column 7 of Table IV or a nucleic acid molecule comprising the nucleic acid molecules shown in column 5 or 7 of Table I or encoding a polypeptide comprising the amino acid sequences, consensus sequences or polypeptide motifs shown in column 5 or 7 of Table II or IV can be achieved for example using the following methods:
[0488] a) introduction of a double-stranded RNA nucleic acid sequence (dsRNA) as described above or of an expression cassette, or more than one expression cassette, ensuring the expression of the latter;
[0489] b) introduction of an antisense nucleic acid sequence or of an expression cassette ensuring the expression of the latter. Encompassed are those methods in which the antisense nucleic acid sequence is directed against a gene (i.e. genomic DNA sequences including the promoter sequence) or a gene transcript (i.e. RNA sequences) including the 5′ and 3′ non-translated regions. Also encompassed are alpha-anomeric nucleic acid sequences;
[0490] c) introduction of an antisense nucleic acid sequence in combination with a ribozyme or of an expression cassette ensuring the expression of the former;
[0491] d) introduction of sense nucleic acid sequences for inducing cosuppression or of an expression cassette ensuring the expression of the former;
[0492] e) introduction of a nucleic acid sequence encoding dominant-negative protein or of an expression cassette ensuring the expression of the latter;
[0493] f) introduction of DNA-, RNA- or protein-binding factor or antibodies against genes, RNA's or proteins or of an expression cassette ensuring the expression of the latter;
[0494] g) introduction of viral nucleic acid sequences and expression constructs which bring about the degradation of RNA, or of an expression cassette ensuring the expression of the former;
[0495] h) introduction of constructs for inducing homologous recombination on endogenous genes, for example for generating knockout mutants;
[0496] i) introduction of mutations into endogenous genes for generating a loss of function (e.g. generation of stop codons, reading-frame shifts and the like);
[0497] j) introduction of a microRNA or micro-RNA (miRNA) that has been designed to target the gene of interest in order to induce a breakdown or translation inhibition of the mRNA of the gene of interest and thereby silence gene expression or of an expression cassette ensuring the expression of the former;
[0498] k) introduction of a ta-sRNA that has been designed to target the gene of interest in order to induce breakdown or translational inhibition of the mRNA of the gene of interest and thereby silence gene expression or of an expression cassette ensuring the expression of the former; and/or
[0499] l) identifying a non silent mutation, e.g. generation of stop codons, reading-frame shifts, inversions and the like in random mutagenized population, e.g. according to the so called TILLING method.

[0500] Each of these methods may bring about a reduction in the expression, the activity or the function for the purposes of the invention. A combined use is also feasible. Further methods are known to the skilled worker and may encompass all possible steps of gene expression, like hindering or preventing processing of the protein, transport of the protein or its mRNA, inhibition of ribosomal attachment, inhibition of RNA splicing, induction of an enzyme which degrades RNA or the protein of the invention and/or inhibition of translational elongation or termination.

[0501] Accordingly, the following paragraphs relate preferably to the repression, reduction, decrease or deletion of an activity selected from the group consisting of 1-phosphatidylinositol 4-kinase, amino acid permease (AAP1), At3g55990-protein, At5g40590-protein, ATP-dependent peptidase/ATPase/nucleoside-triphosphatase/serine-type endopeptidase, DC1 domain-containing protein/protein-binding protein/zinc ion binding protein, DNA binding protein/transcription factor, hydro-lyase/aconitate hydratase, metalloexopeptidase (MAP1C), methyltransferase, nitrate transporter (ATNRT2.3), nitrate/chlorate transporter (NRT1.1), pectate lyase protein/powdery mildew susceptibility protein (PMR6), peptidase/ubiquitin-protein ligase/zinc ion binding protein (JR700), proton-dependent oligopeptide transport protein, transcription factor, and ubiquitin conjugating enzyme/ubiquitin-like activating enzyme, or an activity being represented by a nucleic acid molecule or polypeptide which activity is to be reduced in the process of the invention, in particular of a nucleic acid molecule comprising a polynucleotide as depicted in column 5 or 7, of Table I, preferably of column 5, or encoding a polypeptide comprising a polypeptide, a consensus sequence or polypeptide motif as depicted in column 5 or 7 of Table II or IV, preferably of column 5.

[0502] Thus, a reference to column 5 or 7 of Table I, Table I A, Table I B, Table II, Table II A, Table II B, Table III or Table IV as used herein refers preferably to column 5 or 7 of Table I, Table I A, Table I B, Table II, Table II A, Table II B, Table III or Table IV, respectively.

[0503] What follows is a brief description of the individual preferred methods.

[0504] a) Introduction of a double-stranded RNA nucleic acid sequence (dsRNA) e.g. for the reduction or deletion of activity of the nucleic acid molecule or polypeptide which activity is to be reduced in the process of the invention, in particular of a nucleic acid molecule comprising a polynucleotide as depicted in column 5 or 7, of Table I or encoding a polypeptide comprising a polypeptide, consensus sequence or polypeptide motif as depicted in column 5 or 7 of Table II or IV

[0505] The method of regulating genes by means of double-stranded RNA (“double-stranded RNA interference”; dsRNAi) has been described extensively for animal, yeast, fungi and plant organisms such as Neurospora, Zebrafish, Drosophila, mice, planaria, humans, Trypanosoma, petunia or Arabidopsis [for example Matzke M A et al. (2000) Plant Mol. Biol. 43: 401-415; Fire A. et al. (1998) Nature 391: 806-811; WO 99/32619; WO 99/53050; WO 00/68374; WO 00/44914; WO 00/44895; WO 00/49035; WO 00/63364]. In addition RNAi is also documented as an advantageously tool for the repression of genes in bacteria such as E. coli for example by Tchurikov et al. [J. Biol. Chem., 2000, 275 (34): 26523-26529]. Fire et al. named the phenomenon RNAi for RNA interference. The techniques and methods described in the above references are expressly referred to. Efficient gene suppression can also be observed in the case of transient expression or following transient transformation, for example as the consequence of a biolistic transformation [Schweizer P et al. (2000) Plant J 2000 24: 895-903]. dsRNAi methods are based on the phenomenon that the simultaneous introduction of complementary strand and counterstrand of a gene transcript brings about highly effective suppression of the expression of the gene in question. The resulting phenotype is very similar to that of an analogous knock-out mutant (Waterhouse P M et al. (1998) Proc. Natl. Acad. Sci. USA 95: 13959-64).

[0506] Tuschl et al., Gens Dev., 1999, 13 (24): 3191-3197, were able to show that the efficiency of the RNAi method is a function of the length of the duplex, the length of the 3′-end overhangs, and the sequence in these overhangs.

[0507] Accordingly, another embodiment of the invention is a double-stranded RNA molecule (dsRNA), which confers—after being introduced or expressed in a suitable organism, e.g. a plant, or a part thereof—the reduction, repression, decrease or deletion of the an activity selected from the group consisting of: 1-phosphatidylinositol 4-kinase, amino acid permease (AAP1), At3g55990-protein, At5g40590-protein, ATP-dependent peptidase/ATPase/nucleoside-triphosphatase/serine-type endopeptidase, DC1 domain-containing protein/protein-binding protein/zinc ion binding protein, DNA binding protein/transcription factor, hydro-lyase/aconitate hydratase, metalloexopeptidase (MAP1C), methyltransferase, nitrate transporter (ATNRT2.3), nitrate/chlorate transporter (NRT1.1), pectate lyase protein/powdery mildew susceptibility protein (PMR6), peptidase/ubiquitin-protein ligase/zinc ion binding protein (JR700), proton-dependent oligopeptide transport protein, transcription factor, and ubiquitin conjugating enzyme/ubiquitin-like activating enzyme.

[0508] Based on the work of Tuschl et al. and assuming that the underlining principles are conserved between different species the following guidelines can be given to the skilled worker. Accordingly, the dsRNA molecule of the invention or used in the process of the invention preferable fulfills at least one of the following principles:

[0509] to achieve good results the 5′ and 3′ untranslated regions of the used nucleic acid sequence and regions close to the start codon should be in general avoided as this regions are richer in regulatory protein binding sites and interactions between RNAi sequences and such regulatory proteins might lead to undesired interactions;

[0510] in plants the 5′ and 3′ untranslated regions of the used nucleic acid sequence and regions close to the start codon preferably 50 to 100 nt upstream of the start codon give good results and therefore should not be avoided;

[0511] preferably a region of the used mRNA is selected, which is 50 to 100 nt (=nucleotides or bases) downstream of the AUG start codon;

[0512] only dsRNA (=double-stranded RNA) sequences from exons are useful for the method, as sequences from introns have no effect;

[0513] the G/C content in this region should be greater than 30% and less than 70% ideally around 50%;

[0514] a possible secondary structure of the target mRNA is less important for the effect of the RNAi method.

[0515] The dsRNAi method can be particularly effective and advantageous for reducing the expression of the nucleic acid molecule which activity is to be reduced in the process of the invention, particular of a nucleic acid molecule comprising a polynucleotide as depicted in column 5 or 7, of Table I or encoding a polypeptide comprising a polypeptide, consensus sequence or polypeptide motif as depicted column 5 or 7 of Table II or IV and/or homologs thereof. As described inter alia in WO 99/32619, dsRNAi approaches are clearly superior to traditional antisense approaches.

[0516] Accordingly, the invention therefore furthermore relates to double-stranded RNA molecules (dsRNA molecules) which, when introduced into an organism, advantageously into a plant (or a cell, tissue, organ or seed derived therefrom), bring about altered metabolic activity by the reduction in the expression of the nucleic acid molecule which activity is reduced in the process of the invention, particular of a nucleic acid molecule comprising a polynucleotide as depicted in column 5 or 7, of Table I or encoding a polypeptide comprising a polypeptide, consensus sequence or polypeptide motif as depicted in column 5 or 7 of Table II or IV and/or homologs thereof.

[0517] In a double-stranded RNA molecule of the invention, e.g. a dsRNA for reducing the expression of a protein encoded by a nucleic acid molecule which activity is to be reduced in the process of the invention, particular of a nucleic acid molecule comprising a polynucleotide as depicted in column 5 or 7, of Table I and/or homologs thereof,
[0518] i) one of the two RNA strands is essentially identical to at least part of a nucleic acid sequence, and
[0519] ii) the respective other RNA strand is essentially identical to at least part of the complementary strand of a nucleic acid sequence.

[0520] The term “essentially identical” refers to the fact that the dsRNA sequence may also include insertions, deletions and individual point mutations in comparison to the target sequence while still bringing about an effective reduction in expression. Preferably, the identity as defined above amounts to at least 30%, preferably at least 40%, 50%, 60%, 70% or 80%, very especially preferably at least 90%, most preferably 100%, between the “sense” strand of an inhibitory dsRNA and a part-segment of a nucleic acid sequence of the invention including in a preferred embodiment of the invention their endogenous 5′- and 3′ untranslated regions or between the “antisense” strand and the complementary strand of a nucleic acid sequence, respectively. The part-segment amounts to at least 10 bases, preferably at least 17, 18, 19, 20, 21, 22, 23, 24, 25, 26, 27, 28, 29 or 30 bases, especially preferably at least 40, 50, 60, 70, 80 or 90 bases, very especially preferably at least 100, 200, 300 or 400 bases, most preferably at least 500, 600, 700, 800, 900 or more bases or at least 1000 or 2000 bases or more in length. In another preferred embodiment of the invention the part-segment amounts to 17, 18, 19, 20, 21, 22, 23, 24, 25, 26 or 27 bases, preferably to 20, 21, 22, 23, 24 or 25 bases. These short sequences are preferred in animals and plants. The longer sequences preferably between 200 and 800 bases are preferred in non-mammalian animals, preferably in invertebrates, in yeast, fungi or bacteria, but they are also usable in plants. Long double-stranded RNAs are processed in the organisms into many siRNAs (=small/short interfering RNAs) for example by the protein Dicer, which is a ds-specific Rnase III enzyme. As an alternative, an “essentially identical” dsRNA may also be defined as a nucleic acid sequence, which is capable of hybridizing with part of a gene transcript (for example in 400 mM NaCl, 40 mM PIPES pH 6.4, 1 mM EDTA at 50° C. or 70° C. for 12 to 16 h).

[0521] The dsRNA may consist of one or more strands of polymerized ribonucleotides. Modification of both the sugar-phosphate backbone and of the nucleosides may furthermore be present. For example, the phosphodiester bonds of the natural RNA can be modified in such a way that they encompass at least one nitrogen or sulfur heteroatom. Bases may undergo modification in such a way that the activity of, for example, adenosine deaminase is restricted. These and other modifications are described herein below in the methods for stabilizing antisense RNA.

[0522] The dsRNA can be prepared enzymatically; it may also be synthesized chemically, either in full or in part. Short dsRNA up to 30 bp, which effectively mediate RNA interference, can be for example efficiently generated by partial digestion of long dsRNA templates using E. coli ribonuclease III (RNase III). (Yang, D., et al. (2002) Proc. Natl. Acad. Sci. USA 99, 9942.)

[0523] The double-stranded structure can be formed starting from a single, self-complementary strand or starting from two complementary strands. In a single, self-complementary strand, “sense” and “antisense” sequence can be linked by a linking sequence (“linker”) and form for example a hairpin structure. Preferably, the linking sequence may take the form of an intron, which is spliced out following dsRNA synthesis. The nucleic acid sequence encoding a dsRNA may contain further elements such as, for example, transcription termination signals or polyadenylation signals. If the two strands of the dsRNA are to be combined in a cell or an organism advantageously in a plant, this can be brought about in a variety of ways:

[0524] a) transformation of the cell or of the organism, advantageously of a plant, with a vector encompassing the two expression cassettes;

[0525] b) cotransformation of the cell or of the organism, advantageously of a plant, with two vectors, one of which encompasses the expression cassettes with the “sense” strand while the other encompasses the expression cassettes with the “antisense” strand;

[0526] c) supertransformation of the cell or of the organism, advantageously of a plant, with a vector encompassing the expression cassettes with the “sense” strand, after the cell or the organism had already been transformed with a vector encompassing the expression cassettes with the “antisense” strand or vice versa;

[0527] d) hybridization e.g. crossing of two organisms, advantageously of plants, each of which has been transformed with one vector, one of which encompasses the expression cassette with the “sense” strand while the other encompasses the expression cassette with the “antisense” strand;

[0528] e) introduction of a construct comprising two promoters that lead to transcription of the desired sequence from both directions; and/or

[0529] f) infecting of the cell or of the organism, advantageously of a plant, with an engineered virus, which is able to produce the desired dsRNA molecule.

[0530] Formation of the RNA duplex can be initiated either outside the cell or within the cell. If the dsRNA is synthesized outside the target cell or organism it can be introduced into the organism or a cell of the organism by injection, microinjection, electroporation, high velocity particles, by laser beam or mediated by chemical compounds (DEAE-dextran, calciumphosphate, liposomes) or in case of animals it is also possible to feed bacteria such as E. coli strains engineered to express double-stranded RNAi to the animals.

[0531] Accordingly, in one embodiment, the present invention relates to a dsRNA whereby the sense strand of said double-stranded RNA nucleic acid molecule has an identity of at least 30%, 35%, 40%, 45%, 50%, 55% or 60%, preferably 65%, 70%, 75% or 80%, more preferably 85%, 90%, 95%, 96%, 97%, 98% or 99% or more preferably 95%, 96%, 97%, 98%, 99% or 100% to a nucleic acid molecule comprising a nucleic acid molecule as depicted in column 5 or 7 of Table I, preferably as depicted in Table I B, or encoding a polypeptide comprising a polypeptide as depicted in column 5 or 7 of Table II, preferably as depicted in Table II B, or of Table IV.

[0532] Another embodiment of the invention is a dsRNA molecule, comprising a fragment of at least 10 base paires (=bases, nt, nucleotides), preferably at least 17, 18, 19, 20, 21, 22, 23, 24, 25, 26, 27, 28, 29, 30, 35, 40, 45 or 50, especially preferably at least 55, 60, 70, 80 or 90 base pairs, very especially preferably at least 100, 200, 300 or 400 base pairs, most preferably at least 500, 600, 700, 800, 900 or more base pairs or at least 1000 or 2000 base pairs of a nucleic acid molecule with an identity of at least 50%, 60%, 70%, 80% or 90%, preferably 95%, 96%, 97%, 98%, 99% or 100% to a nucleic acid molecule as depicted in column 5 or 7 of Table I, preferably as depicted in Table I B, or to the nucleic acid molecule encoding a polypeptide protein comprising a polypeptide as depicted in column 5 or 7 of Table II, preferably as depicted in Table II B, or of Table IV.

[0533] In another preferred embodiment of the invention the encoded sequence or its part-segment of the dsRNA molecule amounts to 17, 18, 19, 20, 21, 22, 23, 24, 25, 26 or 27 bases, preferably to 20, 21, 22, 23, 24 or 25 bases, whereby the identity of the sequence is essentially 95%, 96%, 97%, 98%, or preferred 99% or 100%.

[0534] The expression of the dsRNA molecule of the invention confers the increase of tolerance and/or resistance to environmental stress and increased biomass production as compared to a corresponding non-transformed wild type plant in the organism or part thereof.

[0535] In a preferred embodiment of the invention the sense and antisense strand of the double-stranded RNA are covalently bound or are bound by other, e.g. weak chemical bonds such as hydrogen bonds to each other and the antisense strand is essentially the complement of the sense-RNA strand.

[0536] As shown in WO 99/53050, the dsRNA may also encompass a hairpin structure, by linking the “sense” and “antisense” strands by a “linker” (for example an intron), which is hereby incorporated by reference. The self-complementary dsRNA structures are preferred since they merely require the expression of a construct and always encompass the complementary strands in an equimolar ratio.

[0537] The expression cassettes encoding the “antisense” or the “sense” strand of the dsRNA or the self-complementary strand of the dsRNA are preferably inserted into a vector and stably inserted into the genome of a plant, using the methods described herein below (for example using selection markers), in order to ensure permanent expression of the dsRNA. Transient expression with bacterial or viral vectors are similar useful.

[0538] The dsRNA can be introduced using an amount which makes possible at least one copy per cell. A larger amount (for example at least 5, 10, 100, 500 or 1 000 copies per cell) may bring about more efficient reduction.

[0539] As has already been described, 100% sequence identity between the dsRNA and a gene transcript of a nucleic acid molecule to be reduced according to the process of the invention, e.g. of one of the molecules comprising a molecule as shown in column 5 or 7 of Table I or encoding a polypeptide encompassing a polypeptide, a consensus sequence or a polypeptide motif as shown in column 5 or 7 of Table II or IV or it's homolog is not necessarily required in order to bring about effective reduction in the expression. The advantage is, accordingly, that the method is tolerant with regard to sequence deviations as may be present as a consequence of genetic mutations, polymorphisms or evolutionary divergences. Thus, for example, using the dsRNA, which has been generated starting from a nucleic acid molecule to be reduced according to the process of the invention, e.g. of one of the molecules comprising a molecule as shown in column 5 or 7 of Table I or encoding a polypeptide encompassing a polypeptide, a consensus sequence or a motif as shown in column 5 or 7 of Table II or IV or homologs thereof of the one organism, may be used to suppress the corresponding expression in another organism.

[0540] The high degree of sequence homology or identity between nucleic acid molecules to be reduced according to the process of the invention, from various organisms (e.g. plants), e.g. of one of the molecules comprising a molecule as depicted in column 5 or 7 of Table I, preferably of Table I B or encoding a polypeptide encompassing a polypeptide, a consensus sequence, or a polypeptide motif as depicted in column 5 or 7 of Table II or IV, preferably II B, allows the conclusion that these proteins are likely conserved to a high degree within the evolution, for example also in other plants, and therefore it is optionally possible that the expression of a dsRNA derived from one of the disclosed nucleic acid molecule to be reduced according to the process of the invention, e.g. of one of the molecules comprising a molecule as depicted in column 5 or 7 of Table I or encoding a polypeptide encompassing a polypeptide, a consensus sequence or a polypeptide motif as depicted in column 5 or 7 of Table II or IV or homologs thereof should also have an advantageous effect in other plant species.

[0541] The dsRNA can be synthesized either in vivo or in vitro. To this end, a DNA sequence encoding a dsRNA can be introduced into an expression cassette under the control of at least one genetic control element (such as, for example, promoter, enhancer, silencer, splice donor or splice acceptor or polyadenylation signal). Suitable advantageous constructs are described herein below. Polyadenylation is not required, nor do elements for initiating translation have to be present.

[0542] A dsRNA can be synthesized chemically or enzymatically. Cellular RNA polymerases or bacteriophage RNA polymerases (such as, for example T3, T7 or SP6 RNA polymerase) can be used for this purpose. Suitable methods for the in-vitro expression of RNA are described (WO 97/32016; U.S. Pat. No. 5,593,874; U.S. Pat. No. 5,698,425, U.S. Pat. No. 5,712,135, U.S. Pat. No. 5,789,214, U.S. Pat. No. 5,804,693). Prior to introduction into a cell, tissue or organism, a dsRNA which has been synthesized in vitro either chemically or enzymatically can be isolated to a higher or lesser degree from the reaction mixture, for example by extraction, precipitation, electrophoresis, chromatography or combinations of these methods. The dsRNA can be introduced directly into the cell or else be applied extracellularly (for example into the interstitial space). In one embodiment of the invention the RNAi method leads to only a partial loss of gene function and therefore enables the skilled worker to study a gene dose effect in the desired organism and to fine tune the process of the invention. In another preferred embodiment it leads to a total loss of function and therefore increases the tolerance and/or resistance to environmental stress and increased biomass production as compared to a corresponding non-transformed wild type plant. Furthermore it enables a person skilled in the art to study multiple functions of a gene.

[0543] Stable transformation of the plant with an expression construct, which brings about the expression of the dsRNA is preferred, however. Suitable methods are described herein below.

[0544] b) Introduction of an antisense nucleic acid sequence, e.g. for the reduction, repression or deletion of the nucleic acid molecule or polypeptide which activity is to be reduced in the process of the invention, in particular of a nucleic acid molecule comprising a polynucleotide as depicted in column 5 or 7, of Table I or encoding a polypeptide comprising a polypeptide, a consensus sequence or a polypeptide motif as depicted in column 5 or 7 of Table II or IV

[0545] Methods for suppressing a specific protein by preventing the accumulation of its mRNA by means of “antisense” technology can be used widely and has been described extensively, including for plants; Sheehy et al. (1988) Proc. Natl. Acad. Sci. USA 85: 8805-8809; U.S. Pat. No. 4,801,34100; Mol J N et al. (1990) FEBS Lett 268(2): 427-430. The antisense nucleic acid molecule hybridizes with, or binds to, the cellular mRNA and/or the genomic DNA encoding the target protein to be suppressed. This process suppresses the transcription and/or translation of the target protein. Hybridization can be brought about in the conventional manner via the formation of a stable duplex or, in the case of genomic DNA, by the antisense nucleic acid molecule binding to the duplex of the genomic DNA by specific interaction in the large groove of the DNA helix.

[0546] In one embodiment, an “antisense” nucleic acid molecule comprises a nucleotide sequence, which is at least in part complementary to a “sense” nucleic acid molecule encoding a protein, e.g., complementary to the coding strand of a double-stranded cDNA molecule or complementary to an encoding mRNA sequence. Accordingly, an antisense nucleic acid molecule can bind via hydrogen bonds to a sense nucleic acid molecule. The antisense nucleic acid molecule can be complementary to an entire coding strand of a nucleic acid molecule conferring the expression of the polypeptide to be reduced in the process of the invention or comprising the nucleic acid molecule which activity is to be reduced in the process of the invention or to only a portion thereof. Accordingly, an antisense nucleic acid molecule can be antisense to a “coding region” of the coding strand of a nucleotide sequence of a nucleic acid molecule of the present invention.

[0547] The term “coding region” refers to the region of the nucleotide sequence comprising codons, which are translated into amino acid residues.

[0548] In another embodiment, the antisense nucleic acid molecule is antisense to a “noncoding region” of the mRNA flanking the coding region of a nucleotide sequence. The term “noncoding region” refers to 5′ and 3′ sequences which flank the coding region that are not translated into a polypeptide, i.e., also referred to as 5′ and 3′ untranslated regions (5′-UTR or 3′-UTR). Advantageously the noncoding region is in the area of 50 bp, 100 bp, 200 bp or 300 bp, preferably 400 bp, 500 bp, 600 bp, 700 bp, 800 bp, 900 bp or 1000 by up- and/or downstream from the coding region.

[0549] Given the coding strand sequences encoding the polypeptide or the nucleic acid molecule to be reduced in the process of the invention, e.g. having above mentioned activity, e.g. the activity of a polypeptide with the activity of the protein which activity is to be reduced in the process of the invention as disclosed herein, antisense nucleic acid molecules can be designed according to the rules of Watson and Crick base pairing.

[0550] Accordingly, yet another embodiment of the invention is an antisense nucleic acid molecule, which confers—after being expressed in a suitable organism, e.g. a plant, or a part thereof—the reduction, repression, or deletion of the an activity selected from the group consisting of: 1-phosphatidylinositol 4-kinase, amino acid permease (AAP1), At3g55990-protein, At5g40590-protein, ATP-dependent peptidase/ATPase/nucleoside-triphosphatase/serine-type endopeptidase, DC1 domain-containing protein/protein-binding protein/zinc ion binding protein, DNA binding protein/transcription factor, hydro-lyase/aconitate hydratase, metalloexopeptidase (MAP1C), methyltransferase, nitrate transporter (ATNRT2.3), nitrate/chlorate transporter (NRT1.1), pectate lyase protein/powdery mildew susceptibility protein (PMR6), peptidase/ubiquitin-protein ligase/zinc ion binding protein (JR700), proton-dependent oligopeptide transport protein, transcription factor, and ubiquitin conjugating enzyme/ubiquitin-like activating enzyme.

[0551] Accordingly, in another embodiment, the invention relates to an antisense nucleic acid molecule, whereby the antisense nucleic acid molecule has an identity of at least 30% to a nucleic acid molecule antisense to a nucleic acid molecule encoding the protein as shown in column 5 or 7 of Table II, preferably as depicted in Table II B, or encoding a protein encompassing a consensus sequence or a polypeptide motif as depicted in of Table IV or being encoded by a nucleic acid molecule comprising a polynucleotide as depicted in column 5 or 7 of Table I, preferably as depicted in Table I B or a homologue thereof as described herein and which confers the increase of tolerance and/or resistance to environmental stress and increased biomass production as compared to a corresponding non-transformed wild type plant, respectively after its expression.

[0552] Thus in another embodiment, the antisense nucleic acid molecule of the invention comprises a fragment of at least 15, 16, 17, 18, 19, 20, 21, 22, 23, 24, 25, 26, 27, 28, 29, 30, 35, 40, 45 or 50, especially preferably at least 60, 70, 80 or 90 base pairs, very especially preferably at least 100, 200, 300 or 400 base pairs, most preferably at least 500, 600, 700, 800, 900 or more base pairs or at least the entire sequence of a nucleic acid molecule with an identity of at least 50% 60%, 70%, 80% or 90%, preferably 100% to an antisense nucleic acid molecule to a nucleic acid molecule conferring the expression of a protein as depicted in column 5 or 7 of Table II, preferably as depicted in Table II B, or encoding a protein encompassing a consensus sequence or a polypeptide motif as depicted in Table IV or being encoded by a nucleic acid molecule comprising a polynucleotide as depicted in column 5 or 7 of Table I, preferably as depicted in Table I B, or a homologue thereof as described herein and which confers after its expression the increase of tolerance and/or resistance to environmental stress and increased biomass production as compared to a corresponding non-transformed wild type plant.

[0553] An antisense nucleic acid sequence which is suitable for reducing the activity of a protein can be deduced using the nucleic acid sequence encoding this protein, for example the nucleic acid sequence which activity is to be reduced in the process of the invention, e.g. comprising a nucleic acid molecule as depicted in column 5 or 7 of Table I or a nucleic acid molecule encoding a polypeptide comprising a polypeptide, a consensus sequence or a polypeptide as depicted in column 5 or 7 of Table II or IV (or homologs, analogs, paralogs, orthologs thereof), by applying the base-pair rules of Watson and Crick. The antisense nucleic acid sequence can be complementary to all of the transcribed mRNA of the protein; it may be limited to the coding region, or it may only consist of one oligonucleotide, which is complementary to part of the coding or noncoding sequence of the mRNA. Thus, for example, the oligonucleotide can be complementary to the nucleic acid region, which encompasses the translation start for the protein. Antisense nucleic acid sequences may have an advantageous length of, for example, 5, 10, 15, 20, 25, 30, 35, 40, 45 or 50 nucleotides but they may also be longer and encompass at least 100, 200, 500, 1000, 2000 or 5000 nucleotides. A particular preferred length is between 15 and 30 nucleotides such as 15, 20, 25 or 30 nucleotides. Antisense nucleic acid sequences can be expressed recombinantly or synthesized chemically or enzymatically using methods known to the skilled worker. For example, an antisense nucleic acid molecule (e.g., an antisense oligonucleotide) can be chemically synthesized using naturally occurring nucleotides or variously modified nucleotides designed to increase the biological stability of the molecules or to increase the physical stability of the duplex formed between the antisense and sense nucleic acids, e.g., phosphorothioate derivatives and acridine substituted nucleotides can be used. Examples of substances which can be used are phosphorothioate derivatives and acridine-substituted nucleotides such as 5-fluorouracil, 5-bromouracil, 5-chlorouracil, 5-iodouracil, hypoxanthin, xanthin, 4-acetylcytosine, 5-(carboxyhydroxymethyl)uracil, 5-carboxymethylaminomethyl-2-thiouridine, 5-carboxymethylaminomethyluracil, dihydrouracil, beta-D-galactosylqueosine, inosine, N6-isopentenyladenine, 1-methylguanine, 1-methylinosine, 2,2-dimethylguanine, 2-methyladenine, 2-methylguanine, 3-methylcytosine, 5-methylcytosine, N6-adenine, 7-methylguanine, 5-methylaminomethyluracil, 5-methoxyaminomethyl-2-thiouracil, beta-D-mannosylqueosine, 5′-methoxycarboxymethyluracil, 5-methoxyuracil, 2-methylthio-N6-isopentenyladenine, uracil-5-oxyacetic acid, pseudouracil, queosine, 2-thiocytosine, 5-methyl-2-thiouracil, 2-thiouracil, 4-thiouracil, 5-methyluracil, methyl uracil-5-oxyacetate, uracil-5-oxyacetic acid, 5-methyl-2-thiouracil, 3-(3-amino-3-N-2-carboxypropyl)uracil and 2,6-diaminopurine. Alternatively, the antisense nucleic acid can be produced biologically using an expression vector into which a nucleic acid molecule has been subcloned in an antisense orientation (i.e., RNA transcribed from the inserted nucleic acid molecule will be of an antisense orientation to a target nucleic acid molecule of interest, described further in the following subsection).

[0554] In a further preferred embodiment, the expression of a protein which activity is to be reduced in the process of the invention, e.g. encoded by a nucleic acid molecule comprising a nucleic acid molecule as depicted in column 5 or 7 of Table I or of a polypeptide comprising a polypeptide, a consensus sequence or a polypeptide motif as depicted in column 5 or 7 of Table II or IV or homologs, analogs, paralogs, orthologs thereof can be inhibited by nucleotide sequences which are complementary to the regulatory region of a gene (for example a promoter and/or enhancer) and which may form triplex structures with the DNA double helix in this region so that the transcription of the gene is reduced. Such methods have been described (Helene C (1991) Anticancer Drug Res. 6(6): 569-84; Helene C et al. (1992) Ann. NY Acad. Sci. 660: 27-36; Maher L J (1992) Bioassays 14(12): 807-815).

[0555] In a further embodiment, the antisense nucleic acid molecule can be an alpha-anomeric nucleic acid. Such alpha-anomeric nucleic acid molecules form specific double-stranded hybrids with complementary RNA in which—as opposed to the conventional b-nucleic acids—the two strands run in parallel with one another (Gautier C et al. (1987) Nucleic Acids Res. 15: 6625-6641). Furthermore, the antisense nucleic acid molecule can also comprise 2′-O-methylribonucleotides (Inoue et al. (1987) Nucleic Acids Res. 15: 6131-6148), or chimeric RNA-DNA analogs (Inoue et al. (1987) FEBS Lett 215: 327-330).

[0556] The antisense nucleic acid molecules of the invention are typically administered to a cell or generated in situ such that they hybridize with or bind to cellular mRNA and/or genomic DNA encoding a polypeptide having the activity of protein which activity is to be reduced in the process of the invention or encoding a nucleic acid molecule having the activity of the nucleic acid molecule which activity is to be reduced in the process of the invention and thereby inhibit expression of the protein, e.g., by inhibiting transcription and/or translation and leading to the aforementioned increased tolerance and/or resistance to environmental stress and increased biomass production as compared to a corresponding non-transformed wild type plant.

[0557] The antisense molecule of the present invention comprises also a nucleic acid molecule comprising a nucleotide sequences complementary to the regulatory region of an nucleotide sequence encoding the natural occurring polypeptide of the invention, e.g. the polypeptide sequences shown in the sequence listing, or identified according to the methods described herein, e.g., its promoter and/or enhancers, e.g. to form triple helical structures that prevent transcription of the gene in target cells. See generally, Helene, C. (1991) Anticancer Drug Des. 6(6): 569-84; Helene, C. et al. (1992) Ann. N.Y. Acad. Sci. 660: 27-36; and Maher, L. J. (1992) Bioassays 14(12): 807-15.

[0558] c) Introduction of an antisense nucleic acid sequence combined with a ribozyme, e.g. for the reduction or deletion of activity of the nucleic acid molecule or polypeptide which activity is to be reduced in the process of the invention, in particular of a nucleic acid molecule comprising a polynucleotide as depicted in column 5 or 7, of Table I or encoding a polypeptide comprising a polypeptide as depicted in column 5 or 7 of Table II or IV

[0559] Yet another embodiment of the invention is a ribozyme, which confers—after being expressed in a suitable organism, e.g. a plant, or a part thereof—the reduction, repression, decrease or deletion of the activity selected from the group consisting of: 1-phosphatidylinositol 4-kinase, amino acid permease (AAP1), At3g55990-protein, At5g40590-protein, ATP-dependent peptidase/ATPase/nucleoside-triphosphatase/serine-type endopeptidase, DC1 domain-containing protein/protein-binding protein/zinc ion binding protein, DNA binding protein/transcription factor, hydro-lyase/aconitate hydratase, metalloexopeptidase (MAP1C), methyltransferase, nitrate transporter (ATNRT2.3), nitrate/chlorate transporter (NRT1.1), pectate lyase protein/powdery mildew susceptibility protein (PMR6), peptidase/ubiquitin-protein ligase/zinc ion binding protein (JR700), proton-dependent oligopeptide transport protein, transcription factor, and ubiquitin conjugating enzyme/ubiquitin-like activating enzyme.

[0560] Thus, in a further embodiment, the invention relates to a ribozyme, which specifically cleaves a nucleic acid molecule conferring expression of a protein as depicted in column 5 or 7 of Table II, preferably as depicted in Table II B, or comprising a consensus sequence or a polypeptide motif as depicted in Table IV or being encoded by a nucleic acid molecule comprising a polynucleotide as depicted in column 5 or 7 of Table I, preferably as depicted in Table I B, or a homologue thereof as described herein, and which confers after its expression the increase of tolerance and/or resistance to environmental stress and increase of biomass production as compared to a corresponding non-transformed wild type plant.

[0561] It is advantageous to combine the above-described antisense strategy with a ribozyme method. Catalytic RNA molecules or ribozymes can be adapted to any target RNA and cleave the phosphodiester backbone at specific positions, thus functionally deactivating the target RNA (Tanner N K (1999) FEMS Microbiol. Rev. 23(3): 257-275). The ribozyme per se is not modified thereby, but is capable of cleaving further target RNA molecules in an analogous manner, thus acquiring the properties of an enzyme. The incorporation of ribozyme sequences into “antisense” RNAs imparts this enzyme-like RNA-cleaving property to precisely these “antisense” RNAs and thus increases their efficiency when inactivating the target RNA. The preparation and the use of suitable ribozyme “antisense” RNA molecules is described, for example, by Haseloff et al. (1988) Nature 33410: 585-591.

[0562] Further the antisense nucleic acid molecule of the invention can be also a ribozyme. Ribozymes are catalytic RNA molecules with ribonuclease activity, which are capable of cleaving a single-stranded nucleic acid, such as an mRNA, to which they have a complementary region. In this manner, ribozymes [for example “Hammer-head” ribozymes; Haselhoff and Gerlach (1988) Nature 33410: 585-591] can be used to catalytically cleave the mRNA of an enzyme to be suppressed and to prevent translation. The ribozyme technology can increase the efficacy of an antisense strategy. Methods for expressing ribozymes for reducing specific proteins are described in (EP 0 291 533, EP 0 321 201, EP 0 360 257). Ribozyme expression has also been described for plant cells [Steinecke P et al. (1992) EMBO J 11(4): 1525-1530; de Feyter R et al. (1996) Mol. Gen. Genet. 250(3): 329-338]. Suitable target sequences and ribozymes can be identified for example as described by Steinecke P, Ribozymes, Methods in Cell Biology 50, Galbraith et al. eds, Academic Press, Inc. (1995), pp. 449-460 by calculating the secondary structures of ribozyme RNA and target RNA and by their interaction [Bayley C C et al. (1992) Plant Mol. Biol. 18(2): 353-361; Lloyd A M and Davis R W et al. (1994) Mol. Gen. Genet. 242(6): 653-657]. For example, derivatives of the tetrahymena L-19 IVS RNA, which have complementary regions to the mRNA of the protein to be suppressed, can be constructed (see also U.S. Pat. No. 4,987,071 and U.S. Pat. No. 5,116,742). As an alternative, such ribozymes can also be identified from a library of a variety of ribozymes via a selection process [Bartel D and Szostak J W (1993) Science 261: 1411-1418].

[0563] d) Introduction of a (sense) nucleic acid sequence for inducing cosuppression, e.g. for the reduction, repression or deletion of activity of the nucleic acid molecule or polypeptide which activity is to be reduced in the process of the invention, in particular of a nucleic acid molecule comprising a polynucleotide as depicted in column 5 or 7, of Table I or encoding a polypeptide comprising a polypeptide, a consensus sequence or a polypeptide motif as depicted in column 5 or 7 of Table II or IV

[0564] Accordingly, yet another embodiment of the invention is a coexpression construct, which confers—after being expressed in a suitable organism, e.g. a plant, or a part thereof—the reduction, repression, or deletion of an activity selected from the group consisting of: 1-phosphatidylinositol 4-kinase, amino acid permease (AAP1), At3g55990-protein, At5g40590-protein, ATP-dependent peptidase/ATPase/nucleoside-triphosphatase/serine-type endopeptidase, DC1 domain-containing protein/protein-binding protein/zinc ion binding protein, DNA binding protein/transcription factor, hydro-lyase/aconitate hydratase, metalloexopeptidase (MAP1C), methyltransferase, nitrate transporter (ATNRT2.3), nitrate/chlorate transporter (NRT1.1), pectate lyase protein/powdery mildew susceptibility protein (PMR6), peptidase/ubiquitin-protein ligase/zinc ion binding protein (JR700), proton-dependent oligopeptide transport protein, transcription factor, and ubiquitin conjugating enzyme/ubiquitin-like activating enzyme.

[0565] Yet another embodiments of the invention is a coexpression construct conferring the decline or inactivation of a molecule conferring the expression of a protein as shown in column 5 or 7 of Table II, preferably as depicted in Table II B, or comprising a consensus sequence or a polypeptide motif as shown in Table IV or being encoded by a nucleic acid molecule comprising a polynucleotide as depicted in column 5 or 7 of Table I, preferably as depicted in Table I B, or a homologue thereof as described herein, e.g. conferring the decline or inactivation of the nucleic acid molecule or the polypeptide of the invention, with the result that the tolerance and/or resistance to environmental stress and the biomass production as compared to a corresponding non-transformed wild type plant are increased.

[0566] The expression of a nucleic acid sequence in sense orientation can lead to cosuppression of the corresponding homologous, endogenous genes. The expression of sense RNA with homology to an endogenous gene can reduce or indeed eliminate the expression of the endogenous gene, in a similar manner as has been described for the following antisense approaches: Jorgensen et al. (1996) Plant Mol. Biol. 31(5): 957-973, Goring et al. (1991) Proc. Natl. Acad. Sci. USA 88: 1770-1774], Smith et al. (1990) Mol. Gen. Genet. 224: 447-481, Napoli et al. (1990) Plant Cell 2: 279-289 or Van der Krol et al. (1990) Plant Cell 2: 291-99. In this context, the construct introduced may represent the homologous gene to be reduced either in full or only in part. The application of this technique to plants has been described for example by Napoli et al. (1990) The Plant Cell 2: 279-289 and in U.S. Pat. No. 5,03410,323. Furthermore the above described cosuppression strategy can advantageously be combined with the RNAi method as described by Brummell et al., 2003, Plant J. 33, pp 793-800. At least in plants it is advantageously to use strong or very strong promoters in cosuppression approaches. Recent work for example by Schubert et al., (Plant Journal 2004, 16, 2561-2572) has indicated that cosuppression effects are dependent on a gene specific threshold level, above which cosuppression occurs.

[0567] e) Introduction of nucleic acid sequences encoding a dominant-negative protein, e.g. for the reduction or deletion of activity of the polypeptide which activity is reduced in the process of the invention, in particular of a polypeptide encoded by a nucleic acid molecule comprising a polynucleotide as depicted in column 5 or 7, of Table I or of a polypeptide comprising a polypeptide, or a consensus sequence or a polypeptide motif as depicted in column 5 or 7 of Table II or IV

[0568] Accordingly, yet another embodiment of the invention is a dominant negative mutant, which confers—after being expressed in a suitable organism, e.g. a plant, or a part thereof—the reduction, repression, or deletion of an activity selected from the group consisting of: 1-phosphatidylinositol 4-kinase, amino acid permease (AAP1), At3g55990-protein, At5g40590-protein, ATP-dependent peptidase/ATPase/nucleoside-triphosphatase/serine-type endopeptidase, DC1 domain-containing protein/protein-binding protein/zinc ion binding protein, DNA binding protein/transcription factor, hydro-lyase/aconitate hydratase, metalloexopeptidase (MAP1C), methyltransferase, nitrate transporter (ATNRT2.3), nitrate/chlorate transporter (NRT1.1), pectate lyase protein/powdery mildew susceptibility protein (PMR6), peptidase/ubiquitin-protein ligase/zinc ion binding protein (JR700), proton-dependent oligopeptide transport protein, transcription factor, and ubiquitin conjugating enzyme/ubiquitin-like activating enzyme.

[0569] Yet another embodiment of the invention is a dominate negative mutant conferring the decline or inactivation of a polypeptide conferring the expression of a protein as depicted in column 5 or 7 of Table II, preferably as depicted in Table II B, or of a polypeptide comprising a consensus sequence or a polypeptide motif as depicted in Table IV or being encoded by a nucleic acid molecule comprising a polynucleotide as depicted in column 5 or 7 of Table I, preferably as depicted in Table I B, or a homologue thereof as described herein, e.g. conferring the decline or inactivation of the nucleic acid molecule or the polypeptide of the invention, with the result that the tolerance and/or resistance to environmental stress and the biomass production as compared to a corresponding non-transformed wild type plant are increased.

[0570] The function or activity of a protein can efficiently also be reduced by expressing a dominant-negative variant of said protein. The skilled worker is familiar with methods for reducing the function or activity of a protein by means of coexpression of its dominant-negative form [Lagna G and Hemmati-Brivanlou A (1998) Current Topics in Developmental Biology 36: 75-98; Perlmutter R M and Alberola-Ila J (1996) Current Opinion in Immunology 8(2): 285-90; Sheppard D (1994) American Journal of Respiratory Cell & Molecular Biology 11(1): 1-6; Herskowitz I (1987) Nature 329 (6136): 219-22].

[0571] A dominant-negative variant can be realized for example by changing of an amino acid of a polypeptide encoded by a nucleic acid molecule comprising a polynucleotide as depicted in column 5 or 7, of Table I or of a polypeptide comprising a polypeptide or a consensus sequence or a polypeptide motif as depicted in column 5 or 7 of Table II or IV or homologs thereof.

[0572] This change can be determined for example by computer-aided comparison (“alignment”). These mutations for achieving a dominant-negative variant are preferably carried out at the level of the nucleic acid sequences. A corresponding mutation can be performed for example by PCR-mediated in-vitro mutagenesis using suitable oligonucleotide primers by means of which the desired mutation is introduced. To this end, methods are used with which the skilled worker is familiar. For example, the “LA PCR in vitro Mutagenesis Kit” (Takara Shuzo, Kyoto) can be used for this purpose. It is also possible and known to those skilled in the art that deleting or changing of functional domains, e.g. TF or other signaling components which can bind but not activate may achieve the reduction of protein activity.

[0573] f) Introduction of DNA- or protein-binding factor against genes RNAs or proteins, e.g. for the reduction, repression or deletion of activity of the nucleic acid molecule or polypeptide which activity is reduced in the process of the invention, in particular of a nucleic acid molecule comprising a polynucleotide as depicted in column 5 or 7, of Table I or encoding a polypeptide comprising a polypeptide or a consensus sequence or a polypeptide motif as depicted in column 5 or 7 of Table II or IV

[0574] Accordingly, yet another embodiment of the invention is a DNA- or protein-binding factor against genes RNAs or proteins, which confers—after being expressed in a suitable organism, e.g. a plant, or a part thereof—the reduction, repression, or deletion of an activity selected from the group consisting of: 1-phosphatidylinositol 4-kinase, amino acid permease (AAP1), At3g55990-protein, At5g40590-protein, ATP-dependent peptidase/ATPase/nucleoside-triphosphatase/serine-type endopeptidase, DC1 domain-containing protein/protein-binding protein/zinc ion binding protein, DNA binding protein/transcription factor, hydro-lyase/aconitate hydratase, metalloexopeptidase (MAP1C), methyltransferase, nitrate transporter (ATNRT2.3), nitrate/chlorate transporter (NRT1.1), pectate lyase protein/powdery mildew susceptibility protein (PMR6), peptidase/ubiquitin-protein ligase/zinc ion binding protein (JR700), proton-dependent oligopeptide transport protein, transcription factor, and ubiquitin conjugating enzyme/ubiquitin-like activating enzyme.

[0575] Yet another embodiment of the invention is a DNA- or protein-binding factor against genes RNAs or proteins conferring the decline or inactivation of a molecule conferring the expression of a protein as depicted in column 5 or 7 of Table II, preferably as depicted in Table II B, or of a polypeptide comprising a consensus sequence or a polypeptide motif as depicted in Table IV or being encoded by a nucleic acid molecule comprising a polynucleotide as depicted in column 5 or 7 of Table I, preferably as depicted in Table I B, or a homologue thereof as described herein, e.g. conferring the decline or inactivation of the nucleic acid molecule or the polypeptide of the invention, with the result that the tolerance and/or resistance to environmental stress and increased biomass production as compared to a corresponding non-transformed wild type plant are increased.

[0576] A reduction in the expression of a gene encoding the nucleic acid molecule or the polypeptide which activity is reduced in the process of the invention, in particular comprising a nucleic acid molecule comprising a polynucleotide as depicted in column 5 or 7, of Table I or encoding a polypeptide comprising a polypeptide, a consensus sequence or a polypeptide motif as depicted in column 5 or 7 of Table II or IV or homologs thereof according to the invention can also be achieved with specific DNA-binding factors, for example factors of the zinc finger transcription factor type. These factors attach to the genomic sequence of the endogenous target gene, preferably in the regulatory regions, and bring about repression of the endogenous gene. The use of such a method makes possible the reduction in the expression of an endogenous gene without it being necessary to recombinantly manipulate the sequence of the latter. Such methods for the preparation of relevant factors are described in Dreier B et al. (2001) J. Biol. Chem. 276(31): 29466-78 and (2000) J. Mol. Biol. 303(4): 489-502, Beerli R R et al. (1998) Proc. Natl. Acad. Sci. USA 95(25): 14628-14633; (2000) Proc. Natl. Acad. Sci. USA 97(4): 1495-1500 and (2000) J. Biol. Chem. 275(42): 32617-32627), Segal D J and Barbas C F, 3rd (2000) Curr. Opin. Chem. Biol. 4(1): 3410-39, Kang J S and Kim J S (2000) J. Biol. Chem. 275(12): 8742-8748, Kim J S et al. (1997) Proc. Natl. Acad. Sci. USA 94(8): 3616-3620, Klug A (1999) J. Mol. Biol. 293(2): 215-218, Tsai S Y et al. (1998) Adv. Drug Deliv. Rev. 30(1-3): 23-31, Mapp A K et al. (2000) Proc. Natl. Acad. Sci. USA 97(8): 3930-3935, Sharrocks A D et al. (1997) Int. J. Biochem. Cell Biol. 29(12): 1371-1387 and Zhang L et al. (2000) J. Biol. Chem. 275(43): 33850-33860. Examples for the application of this technology in plants have been described in WO 01/52620, Ordiz M I et al., (Proc. Natl. Acad. Sci. USA, Vol. 99, Issue 20, 13290-13295, 2002) or Guan et al., (Proc. Natl. Acad. Sci. USA, Vol. 99, Issue 20, 13296-13301, 2002)

[0577] These factors can be selected using any portion of a gene. This segment is preferably located in the promoter region. For the purposes of gene suppression, however, it may also be located in the region of the coding exons or introns. The skilled worker can obtain the relevant segments from Genbank by database search or starting from a cDNA whose gene is not present in Genbank by screening a genomic library for corresponding genomic clones.

[0578] It is also possible to first identify sequences in a target crop, which encompass the nucleic acid molecule or which encode the polypeptide which activity is reduced in the process of the invention, in particular of a nucleic acid molecule comprising a polynucleotide as depicted in column 5 or 7, of Table I B or encoding a polypeptide comprising a polypeptide, a consensus sequence or a polypeptide motif as depicted in column 5 or 7 of Table II B or homologs thereof, then find the promoter and reduce expression by the use of the abovementioned factors.

[0579] The skilled worker is familiar with the methods required for doing so.

[0580] Furthermore, factors which are introduced into a cell may also be those which themselves inhibit the target protein. The protein-binding factors can, for example, be aptamers [Famulok M and Mayer G (1999) Curr. Top Microbiol. Immunol. 243: 123-36] or antibodies or antibody fragments or single-chain antibodies. Obtaining these factors has been described, and the skilled worker is familiar therewith. For example, a cytoplasmic scFv antibody has been employed for modulating activity of the phytochrome A protein in genetically modified tobacco plants [Owen M et al. (1992) Biotechnology (NY) 10(7): 790-794; Franken E et al. (1997) Curr. Opin. Biotechnol. 8(4): 411-416; Whitelam (1996) Trend Plant Sci. 1: 286-272].

[0581] Gene expression may also be suppressed by tailor-made low-molecular-weight synthetic compounds, for example of the polyamide type Dervan P B and Bürli R W (1999) Current Opinion in Chemical Biology 3: 688-693; Gottesfeld J M et al. (2000) Gene Expr. 9(1-2): 77-91. These oligomers consist of the units 3-(dimethylamino)propylamine, N-methyl-3-hydroxypyrrole, N-methylimidazole and N-methylpyrroles; they can be adapted to each portion of double-stranded DNA in such a way that they bind sequence-specifically to the large groove and block the expression of the gene sequences located in this position. Suitable methods have been described in Bremer R E et al. [(2001) Bioorg. Med. Chem. 9 (8): 2093-103], Ansari A Z et al. [(2001) Chem. Biol. 8(6): 583-92], Gottesfeld J M et al. [(2001) J. Mol. Biol. 309(3): 615-29], Wurtz N R et al. [(2001) Org. Lett 3(8): 1201-3], Wang C C et al. [(2001) Bioorg. Med. Chem. 9(3): 653-7], Urbach A R and Dervan P B [(2001) Proc. Natl. Acad. Sci. USA 98(8): 434103-8] and Chiang S Y et al. [(2000) J. Biol. Chem. 275(32): 24246-54].

[0582] g) Introduction of viral nucleic acid sequences and expression constructs which bring about the degradation of RNA, e.g. for the reduction, repression or deletion of activity of the nucleic acid molecule or polypeptide which activity is to be reduced in the process of the invention, in particular of a nucleic acid molecule comprising a polynucleotide as depicted in column 5 or 7, of Table I or encoding a polypeptide comprising a polypeptide, a consensus sequence or a polypeptide motif as depicted in column 5 or 7 of Table II or IV.

[0583] Accordingly, yet another embodiment of the invention is a viral nucleic acid molecule, which confers—after being expressed in a suitable organism, e.g. a plant, or a part thereof—the reduction, repression, or deletion of an activity selected from the group consisting of: 1-phosphatidylinositol 4-kinase, amino acid permease (AAP1), At3g55990-protein, At5g40590-protein, ATP-dependent peptidase/ATPase/nucleoside-triphosphatase/serine-type endopeptidase, DC1 domain-containing protein/protein-binding protein/zinc ion binding protein, DNA binding protein/transcription factor, hydro-lyase/aconitate hydratase, metalloexopeptidase (MAP1C), methyltransferase, nitrate transporter (ATNRT2.3), nitrate/chlorate transporter (NRT1.1), pectate lyase protein/powdery mildew susceptibility protein (PMR6), peptidase/ubiquitin-protein ligase/zinc ion binding protein (JR700), proton-dependent oligopeptide transport protein, transcription factor, and ubiquitin conjugating enzyme/ubiquitin-like activating enzyme.

[0584] Yet another embodiment of the invention is a viral nucleic acid molecule conferring the decline or inactivation of a RNA molecule conferring the expression of a protein as depicted in column 5 or 7 of Table II, preferably as depicted in Table II B, or a polypeptide comprising a consensus sequence or a polypeptide motif of Table IV or being encoded by a nucleic acid molecule comprising a polynucleotide as depicted in column 5 or 7 of Table I, preferably as depicted in Table I B, or a homologue thereof as described herein, e.g. conferring the decline or inactivation of the nucleic acid molecule or the polypeptide of the invention, with the result that the tolerance and/or resistance to environmental stress and the biomass production as compared to a corresponding non-transformed wild type plant are increased.

[0585] Inactivation or downregulation can also be efficiently brought about by inducing specific RNA degradation by the organism, advantageously in the plant, with the aid of a viral expression system (Amplikon) (Angell, S M et al. (1999) Plant J. 20(3): 357-362). Nucleic acid sequences with homology to the transcripts to be suppressed are introduced into the plant by these systems—also referred to as “VIGS” (viral induced gene silencing) with the aid of viral vectors. Then, transcription is switched off, presumably mediated by plant defense mechanisms against viruses. Suitable techniques and methods are described in Ratcliff F et al. (2001) Plant J. 25(2): 237-45, Fagard M and Vaucheret H (2000) Plant Mol. Biol. 43(2-3): 285-93, Anandalakshmi Ret al. (1998) Proc. Natl. Acad. Sci. USA 95(22): 13079-84 and Ruiz M T (1998) Plant Cell 10(6): 937-46.

[0586] h) Introduction of constructs for inducing a homologous recombination on endogenous genes, for example for generating knock-out mutants e.g. for the reduction, repression or deletion of activity of the nucleic acid molecule or polypeptide which activity is reduced in the process of the invention, in particular of a nucleic acid molecule comprising a polynucleotide as depicted in column 5 or 7, of Table I or encoding a polypeptide comprising a polypeptide, a consensus sequence or a polypeptide motif as depicted in column 5 or 7 of Table II or IV.

[0587] Accordingly, yet another embodiment of the invention is a construct for inducing a homologous recombination on endogenous genes, which confers—after being introduced in a suitable organism, e.g. a plant, or a part thereof—the reduction, repression, or deletion of an activity selected from the group consisting of: 1-phosphatidylinositol 4-kinase, amino acid permease (AAP1), At3g55990-protein, At5g40590-protein, ATP-dependent peptidase/ATPase/nucleoside-triphosphatase/serine-type endopeptidase, DC1 domain-containing protein/protein-binding protein/zinc ion binding protein, DNA binding protein/transcription factor, hydro-lyase/aconitate hydratase, metalloexopeptidase (MAP1C), methyltransferase, nitrate transporter (ATNRT2.3), nitrate/chlorate transporter (NRT1.1), pectate lyase protein/powdery mildew susceptibility protein (PMR6), peptidase/ubiquitin-protein ligase/zinc ion binding protein (JR700), proton-dependent oligopeptide transport protein, transcription factor, and ubiquitin conjugating enzyme/ubiquitin-like activating enzyme.

[0588] Yet another embodiment of the invention is a construct for inducing homologous recombination on endogenous genes conferring the decline or inactivation of a molecule conferring the expression of a protein as depicted in column 5 or 7 of Table II, preferably as depicted in Table II B, or of a polypeptide comprising a consensus sequence or a polypeptide motif as depicted in Table IV or being encoded by a nucleic acid molecule comprising a polynucleotide as depicted in column 5 or 7 of Table I, preferably as depicted in Table I B, or a homologue thereof as described herein, e.g. conferring the decline or inactivation of the nucleic acid molecule or the polypeptide of the invention, with the result that the tolerance and/or resistance to environmental stress and the biomass production as compared to a corresponding non-transformed wild type plant are increased.

[0589] To generate a homologously-recombinant organism with reduced activity, a nucleic acid construct is used which, for example, comprises at least part of an endogenous gene which is modified by a deletion, addition or substitution of at least one nucleotide in such a way that the functionality is reduced or completely eliminated. The modification may also affect the regulatory elements (for example the promoter) of the gene so that the coding sequence remains unmodified, but expression (transcription and/or translation) does not take place or is reduced.

[0590] In the case of conventional homologous recombination, the modified region is flanked at its 5′ and 3′ end by further nucleic acid sequences, which must be sufficiently long for allowing recombination. Their length is, as a rule, in a range of from one hundred bases up to several kilobases [Thomas K R and Capecchi M R (1987) Cell 51: 503; Strepp et al. (1998) Proc. Natl. Acad. Sci. USA 95(8): 4368-4373]. In the case of homologous recombination, the host organism—for example a plant—is transformed with the recombination construct using the methods described herein below, and clones, which have successfully undergone recombination are selected using for example a resistance to antibiotics or herbicides. Using the cotransformation technique, the resistance to antibiotics or herbicides can subsequently advantageously be re-eliminated by performing crosses. An example for an efficient homologous recombination system in plants has been published in Nat. Biotechnol. 2002 October; 20(10): 1030-4, Terada R et al.: Efficient gene targeting by homologous recombination in rice.

[0591] Homologous recombination is a relatively rare event in higher eukaryotes, especially in plants. Random integrations into the host genome predominate. One possibility of removing the randomly integrated sequences and thus increasing the number of cell clones with a correct homologous recombination is the use of a sequence-specific recombination system as described in U.S. Pat. No. 6,110,736, by means of which unspecifically integrated sequences can be deleted again, which simplifies the selection of events which have integrated successfully via homologous recombination. A multiplicity of sequence-specific recombination systems may be used, examples which may be mentioned being Cre/lox system of bacteriophage P1, the FLP/FRT system from yeast, the Gin recombinase of phage Mu, the Pin recombinase from E. coli and the R/RS system of the pSR1 plasmid. The bacteriophage P1 Cre/lox system and the yeast FLP/FRT system are preferred. The FLP/FRT and the cre/lox recombinase system have already been applied to plant systems [Odell et al. (1990) Mol. Gen. Genet. 223: 369-378].

[0592] I) Introduction of mutations into endogenous genes for bringing about a loss of function (for example generation of stop codons, reading-frame shifts and the like) e.g. for the reduction, repression or deletion of activity of the nucleic acid molecule or polypeptide which activity is reduced in the process of the invention, in particular of a nucleic acid molecule comprising a polynucleotide as depicted in column 5 or 7, of Table I or encoding a polypeptide comprising a polypeptide, a consensus sequence or a polypeptide motif as depicted in column 5 or 7 of Table II or IV

[0593] Accordingly, yet another embodiment of the invention is a mutated homologue of the nucleic acid molecule which activity is reduced in the process of the invention and, which confers—after being expressed in a suitable organism, e.g. a plant, or a part thereof—the reduction, repression, or deletion of an activity selected from the group consisting of: 1-phosphatidylinositol 4-kinase, amino acid permease (AAP1), At3g55990-protein, At5g40590-protein, ATP-dependent peptidase/ATPase/nucleoside-triphosphatase/serine-type endopeptidase, DC1 domain-containing protein/protein-binding protein/zinc ion binding protein, DNA binding protein/transcription factor, hydro-lyase/aconitate hydratase, metalloexopeptidase (MAP1C), methyltransferase, nitrate transporter (ATNRT2.3), nitrate/chlorate transporter (NRT1.1), pectate lyase protein/powdery mildew susceptibility protein (PMR6), peptidase/ubiquitin-protein ligase/zinc ion binding protein (JR700), proton-dependent oligopeptide transport protein, transcription factor, and ubiquitin conjugating enzyme/ubiquitin-like activating enzyme.

[0594] Further suitable methods for reducing activity are the introduction of nonsense, deletion or integration mutations into endogenous genes, for example by introducing RNA/DNA oligonucleotides into the plant [Zhu et al. (2000) Nat. Biotechnol. 18(5): 555-558], and the generation of knock-out mutants with the aid of, for example, T-DNA mutagenesis [Koncz et al. (1992) Plant Mol. Biol. 20(5): 963-976], ENU-(N-ethyl-N-nitrosourea)—mutagenesis or homologous recombination [Hohn B and Puchta (1999) H. Proc. Natl. Acad. Sci. USA 96: 8321-8323]. Point mutations may also be generated by means of DNA-RNA hybrids also known as “chimeraplasty” [Cole-Strauss et al. (1999) Nucl. Acids Res. 27(5): 1323-1330; Kmiec (1999) Gene Therapy American Scientist 87(3): 240-247]. The mutation sites may be specifically targeted or randomly selected. If the mutations have been created randomly e.g. by Transposon-Tagging or chemical mutagenesis, the skilled worked is able to specifically enrich selected mutation events in the inventive nucleic acids, especially by different PCR methods know to the person skilled in the art. Mutations can also be introduced by the introduction of so-called homing endonucleases which can be designed to set double strand breaks in specific sequences within the genome. The repair of said double strand breaks often leads to the desired non-functional mutations. [Arnould et al (2006) Engineering of large numbers of highly specific homing endonucleases that induce recombination on novel DNA targets. Journal of Molecular Biology 355(3): 443-458]

[0595] j) Introduction of a microRNA (or micro-RNA) that has been designed to target the gene of interest in order to induce a breakdown or translational inhibition of the mRNA of the gene of interest and thereby silence gene expression or of an expression cassette ensuring the expression of the former, e.g. for the reduction, repression or deletion of activity of the nucleic acid molecule or polypeptide which activity is reduced in the process of the invention, in particular of a nucleic acid molecule comprising a polynucleotide as depicted in column 5 or 7, of Table I or encoding a polypeptide comprising a polypeptide, a consensus sequence or a polypeptide motif as depicted in column 5 or 7 of Table II or IV

[0596] Accordingly, yet another embodiment of the invention is a miRNA molecule, which confers—after being expressed in a suitable organism, e.g. a plant, or a part thereof—the reduction, repression, or deletion of an activity selected from the group consisting of: 1-phosphatidylinositol 4-kinase, amino acid permease (AAP1), At3g55990-protein, At5g40590-protein, ATP-dependent peptidase/ATPase/nucleoside-triphosphatase/serine-type endopeptidase, DC1 domain-containing protein/protein-binding protein/zinc ion binding protein, DNA binding protein/transcription factor, hydro-lyase/aconitate hydratase, metalloexopeptidase (MAP1C), methyltransferase, nitrate transporter (ATNRT2.3), nitrate/chlorate transporter (NRT1.1), pectate lyase protein/powdery mildew susceptibility protein (PMR6), peptidase/ubiquitin-protein ligase/zinc ion binding protein (JR700), proton-dependent oligopeptide transport protein, transcription factor, and ubiquitin conjugating enzyme/ubiquitin-like activating enzyme.

[0597] Yet another embodiment of the invention is a miRNA molecule conferring the decline or inactivation of a molecule conferring the expression of a protein as depicted in column 5 or 7 of Table II, preferably as depicted in Table II B, or a polypeptide comprising a consensus sequence or a polypeptide motif as depicted in Table IV or being encoded by a nucleic acid molecule comprising a polynucleotide as depicted in column 5 or 7 of Table I, preferably as depicted in Table I B, or a homologue thereof as described herein, e.g. conferring the decline or inactivation of the nucleic acid molecule or the polypeptide of the invention, with the result that the tolerance and/or resistance to environmental stress and the biomass production as compared to a corresponding non-transformed wild type plant are increased.

[0598] MicroRNAs (miRNAs) have emerged as evolutionarily conserved, RNA-based regulators of gene expression in plants and animals. MiRNAs (˜21 to 25 nt) arise from larger precursors with a stem loop structure that are transcribed from non-protein-coding genes. miRNA targets a specific mRNA to suppress gene expression at post-transcriptional (i.e. degrades mRNA) or translational levels (i.e. inhibits protein synthesis) (Bartel D 2004, Cell 116, 281-297). MiRNAs can be efficiently designed to specifically target and down regulated selected genes. Determinants of target selection of natural plant miRNAs have been analysed by Schwab and coworkers (Schwab et al. 2005, 2005 Dev. Cell 8, 517-527). This work has been extended to the design and use of artificial miRNAs (amiRNAs) to efficiently down regulate target genes, resulting in concepts and rules for the design of effective amiRNAs for directed gene silencing [Highly Specific Gene Silencing by Artificial microRNAs in Arabidopsis, Schwab et al., Plant Cell 2006 18 (4)] and a web based tool for efficient amiRNA design (http://wmd.weigelworld.org).

[0599] k) Introduction of a transacting small interfering RNA (ta-siRNA) or of an expression cassette ensuring the expression of the former, e.g. for the reduction, repression or deletion of activity of the nucleic acid molecule or polypeptide which activity is reduced in the process of the invention, in particular of a nucleic acid molecule comprising a polynucleotide as depicted in column 5 or 7, of Table I or encoding a polypeptide comprising a polypeptide, a consensus sequence or a polypeptide motif as depicted in column 5 or 7 of Table II or IV

[0600] Accordingly, yet another embodiment of the invention is a ta-siRNA, which confers—after being expressed in a suitable organism, e.g. a plant, or a part thereof—the reduction, repression, or deletion of an activity selected from the group consisting of: 1-phosphatidylinositol 4-kinase, amino acid permease (AAP1), At3g55990-protein, At5g40590-protein, ATP-dependent peptidase/ATPase/nucleoside-triphosphatase/serine-type endopeptidase, DC1 domain-containing protein/protein-binding protein/zinc ion binding protein, DNA binding protein/transcription factor, hydro-lyase/aconitate hydratase, metalloexopeptidase (MAP1C), methyltransferase, nitrate transporter (ATNRT2.3), nitrate/chlorate transporter (NRT1.1), pectate lyase protein/powdery mildew susceptibility protein (PMR6), peptidase/ubiquitin-protein ligase/zinc ion binding protein (JR700), proton-dependent oligopeptide transport protein, transcription factor, and ubiquitin conjugating enzyme/ubiquitin-like activating enzyme.

[0601] Yet another embodiment of the invention is a ta-siRNA conferring the decline or inactivation of a molecule conferring the expression of a protein as depicted in column 5 or 7 of Table II, preferably as depicted in Table II B, or a polypeptide comprising a consensus sequence or a polypeptide motif as depicted in Table IV or being encoded by a nucleic acid molecule comprising a polynucleotide as depicted in column 5 or 7 of Table I, preferably as depicted in Table I B, or a homologue thereof as described herein, e.g. conferring the decline or inactivation of the nucleic acid molecule or the polypeptide of the invention, with the result that the tolerance and/or resistance to environmental stress and the biomass production as compared to a corresponding non-transformed wild type plant are increased.

[0602] A transacting small interfering RNA (ta-siRNA) can be designed to target the gene of interest in order to induce a breakdown of the mRNA of the gene of interest and thereby silence gene expression.

[0603] Methods employing ta-siRNAs useful for the repression or inactivation of a gene product according to the process of the present invention are described in U.S. 60/672,976 and 60/718,645.

[0604] Nucleic acid sequences as described in item B) to K) are expressed in the cell or organism by transformation/transfection of the cell or organism or are introduced in the cell or organism by known methods, for example as disclosed in item A).

[0605] l) Identifying a non silent mutation, e.g. generation of stop codons, reading-frame shifts, integrations, inversions and the like in random mutagenized population according to different approaches like reverse screening or the so called TILLING (Targeting Induced Local Lesions IN Genomes) method, e.g. for the reduction, repression or deletion of activity of the nucleic acid molecule or polypeptide which activity is reduced in the process of the invention, in particular of a nucleic acid molecule comprising a polynucleotide as depicted in column 5 or 7, of Table I or encoding a polypeptide comprising a polypeptide, a consensus sequence or a polypeptide motif, as depicted in column 5 or 7 of Table II or IV.

[0606] Accordingly, yet another embodiment of the invention is a TLLING or severse screening primer or a heteroduplex between a mutated DNA and a wild type DNA, which can be used to a identify mutation which confers—after being expressed in a suitable organism, e.g. a plant, or a part thereof—the reduction, repression, or deletion of an activity selected from the group consisting of: 1-phosphatidylinositol 4-kinase, amino acid permease (AAP1), At3g55990-protein, At5g40590-protein, ATP-dependent peptidase/ATPase/nucleoside-triphosphatase/serine-type endopeptidase, DC1 domain-containing protein/protein-binding protein/zinc ion binding protein, DNA binding protein/transcription factor, hydro-lyase/aconitate hydratase, metalloexopeptidase (MAP1C), methyltransferase, nitrate transporter (ATNRT2.3), nitrate/chlorate transporter (NRT1.1), pectate lyase protein/powdery mildew susceptibility protein (PMR6), peptidase/ubiquitin-protein ligase/zinc ion binding protein (JR700), proton-dependent oligopeptide transport protein, transcription factor, and ubiquitin conjugating enzyme/ubiquitin-like activating enzyme.

[0607] Yet another embodiment of the invention is a TLLING or reverse screening primer for identifying a mutation conferring the decline or inactivation of a molecule conferring the expression of a protein as depicted in column 5 or 7 of Table II, preferably as depicted in Table II B, or of a polypeptide comprising a consensus sequence or a polypeptide motif as depicted in Table IV or being encoded by a nucleic acid molecule comprising a polynucleotide as depicted in column 5 or 7 of Table I, preferably as depicted in Table I B, or a homologue thereof as described herein, e.g. conferring the decline or inactivation of the nucleic acid molecule or the polypeptide of the invention, with the result that the tolerance and/or resistance to environmental stress and the biomass production as compared to a corresponding non-transformed wild type plant are increased.

[0608] Particular preferred is a TILLING or a reverse screening primer for the identification of a mutation in a nucleic acid molecule which is a homologue of a nucleic acid molecule as depicted in column 5 or 7 of Table I, preferably as depicted in Table I B, such as a nucleic acid molecule comprising a nucleic acid molecule as depicted in column 5 or 7 of Table I, preferably as depicted in Table I B but which is mutated in one or more nucleotides.

[0609] In one embodiment, the TILLING or reverse screening primer comprises a fragment of at least 17 nucleotides (nt), preferably of 18, 19, 20, 21, 22, 23, 24, 25, 27, 30 nt of a nucleic acid molecule as depicted in column 5 or 7 of Table I, preferably as depicted in Table I B.

[0610] In one embodiment, the TILLING or reverse screening primer comprises a fragment of at least 17 nucleotides (nt), preferably of 18, 19, 20, 21, 22, 23, 24, 25, 27, 30 nt and which is at least 70%, 75%, 80%, 90%, more preferred at least 95%, most preferred 100% homologue to a nucleic acid molecule as depicted in column 5 or 7 of Table I, preferably as depicted in Table I B.

[0611] For the TILLING, mutations are induced by treatment with a chemical mutagen (EMS). DNAs are prepared from individuals and arrayed in pools for initial screening. These pools become templates for PCR using primers that amplify a region of interest. Heteroduplexes are formed between wild-type and mutant fragments in the pool by denaturing and reannealing PCR products. These heteroduplexes are the substrate for cleavage by the nuclease CEL I. After digestion, the resulting products are visualized using standard fluorescent sequencing slab gel electrophoresis. Positive pools are then rescreened as individual DNAs, thus identifying the mutant plant and the approximate position of the mutation along the sequence. This positional information increases the efficiency of sequence analysis, as heterozygous mutations may be otherwise difficult to identify.

[0612] High-throughput TILLING is for example described in Colbert et al. (2001) Plant Physiology 126: 480-484 and has recently been applied to crops [reviewed in Slade and Knauf, Transgenic Res. 2005 April; 14(2): 109-15].

[0613] Other reverse screening methods aims to identify individuals in populations, mutated through the random integration of nucleic acids, like transposons or T-DNAs have been described severals times, eg. Krysan et al., 1999 (Plant Cell 1999, 11, 2283-2290); Sessions et al., 2002 (Plant Cell 2002, 14, 2985-2994); Young et al., 2001, (Plant Physiol. 2001, 125, 513-518); Koprek et al., 2000 (Plant J. 2000, 24, 253-263); Jeon et al., 2000 (Plant J. 2000, 22, 561-570); Tissier et al., 1999 (Plant Cell 1999, 11, 1841-1852); Speulmann et al., 1999 (Plant Cell 1999, 11, 1853-1866),

[0614] In one further embodiment of the process according to the invention, organisms are used in which one of the abovementioned genes, or one of the above-mentioned nucleic acids, is mutated in such a manner that the activity of the encoded gene products is influenced by cellular factors to a greater extent than in the reference organism, as compared with the unmutated proteins. This kind of mutation could lead to a change in the metabolic activity of the organism, which than causes in a higher tolerance and/or resistance to environmental stress and higher biomass production as compared to a corresponding non-transformed wild type plant. The reason for this higher productivity can be due to a change in regulation mechanism of enzymic activity such as substrate inhibition or feed back regulation. In a further embodiment the process according to the invention, organisms are grown under such conditions, that the expression of the nucleic acids of the invention is reduced or repressed leading to an enhanced tolerance and/or resistance to environmental stress and higher biomass production as compared to a corresponding non-transformed wild type plant according to the invention.

[0615] In one embodiment the tolerance and/or resistance to environmental stress and the biomass production as compared to a corresponding non-transformed wild type plant in the organism or part thereof can be increased by targeted or random mutagenesis of the endogenous genes comprising or encoding the molecule which activity is to be reduced in the process of the invention, e.g. comprising a polynucleotide as depicted in column 5 or 7 of Table I or encoding an polypeptide comprising a polypeptide, a consensus sequence or a polypeptide motif as depicted in column 5 or 7 of Table II or IV.

[0616] For example homologous recombination can be used to either introduce negative regulatory elements or to remove, interrupt or delete enhancer elements form regulatory regions. In addition gene conversion like methods described by Kochevenko and Willmitzer (Plant Physiol. 2003 May; 132(1): 174-84) and citations therein may be modified to disrupt enhancer elements or to enhance to activity of negative regulatory elements. Furthermore mutations or repressing elements can be randomly introduced in (plant) genomes by T-DNA or transposon mutagenesis and lines can be screened for, in which repressing or interrupting elements have be integrated near to a gene of the invention, the expression of which is thereby repressed, reduced or deleted. The inactivation of plant genes by random integrations of enhancer elements has been described.

[0617] Reverse genetic strategies to identify insertions (which eventually carrying the inactivation elements) near in genes of interest have been described for various cases eg. Krysan et al., 1999 (Plant Cell 1999, 11, 2283-2290); Sessions et al., 2002 (Plant Cell 2002, 14, 2985-2994); Young et al., 2001, (Plant Physiol. 2001, 125, 513-518); Koprek et al., 2000 (Plant J. 2000, 24, 253-263); Jeon et al., 2000 (Plant J. 2000, 22, 561-570); Tissier et al., 1999 (Plant Cell 1999, 11, 1841-1852); Speulmann et al., 1999 (Plant Cell 1999, 11, 1853-1866).

[0618] The enhancement of negative regulatory elements or the disruption or weaking of enhancing or activating regulatory elements can also be achieved through common mutagenesis techniques: The production of chemically or radiation mutated populations is a common technique and known to the skilled worker.

[0619] Accordingly, the expression level can be increased if the endogenous genes encoding a polypeptide or a nucleic acid molecule conferring the activity described herein, in particular genes comprising the nucleic acid molecule of the present invention, are modified by a mutagenesis approach via homologous recombination with optional identification by TILLING or other reverse screening approaches, or gene conversion.

[0620] In one embodiment of the invention, the applicable modification of the nucleic acid molecules described herein for the use in the process of the invention, i.e. the reduction, repression or deletion of its activity and being itself encoded by the host organism can for example be achieved by random mutagenesis with chemicals, radiation or UV-light or side directed mutagenesis in such a manner that the tolerance and/or resistance to environmental stress and the biomass production as compared to a corresponding non-transformed wild type plant are increased. This embodiment of the invention shall be deemed as transgenic in the sense of the invention.

[0621] Using the herein mentioned cloning vectors and transformation methods such as those which are published and cited in: Plant Molecular Biology and Biotechnology (CRC Press, Boca Raton, Fla.), chapter 6/7, pp. 71-119 (1993); F. F. White, Vectors for Gene Transfer in Higher Plants; in: Transgenic Plants, vol. 1, Engineering and Utilization, Ed.: Kung and R. Wu, Academic Press, 1993, 15-38; B. Jenes et al., Techniques for Gene Transfer, in: Transgenic Plants, vol. 1, Engineering and Utilization, Ed.: Kung and R. Wu, Academic Press (1993), 128-143; Potrykus, Annu. Rev. Plant Physiol. Plant Molec. Biol. 42 (1991), 205-225)) and further cited below, nucleic acid molecule derived from the polynucleotides described herein for the use in the process of the invention as described herein may be used for the recombinant modification of a wide range of organisms, in particular plants, so that they become a better and more efficient due to the deletion or reduction the activity of genes comprising nucleic acid molecule of the invention or of the expression product of said genes according to the process of the invention.

[0622] The improved tolerance and/or resistance to environmental stress and the biomass production as compared to a corresponding non-transformed wild type plant can be brought about by a direct effect of the manipulation or by an indirect effect of this manipulation.

[0623] In order to improve the introduction of a nucleic acid molecule for reduction, repression, decrease or deletion of the expression or activity of the molecules to be reduced in the process of the invention in an organisms, the nucleic acid molecules disclosed herein or derivates thereof can be incorporated into a nucleic acid construct and/or a vector in such a manner that their introduction into an organism, e.g. a cell, confers an reduced or deleted endogenous or cellulary activity either on the nucleic acid sequence expression level or on the level of the polypeptide encoded by said sequences.

[0624] Accordingly, in order to improve the introduction of a nucleic acid molecule and to confer or improve the reduction, repression, decrease or deletion of the expression or activity of the molecules to be reduced in the process of the invention in an organisms, e.g. in a transgenic plant or microorganism nucleic acid molecules encoding the herein disclosed antisense nucleic acid molecule, RNAi, snRNA, dsRNA, siRNA, miRNA, ta-siRNA, cosuppression molecule, ribozyme, antibodies or other molecule inhibiting the expression or activity of an expression product of the nucleic acid molecule to be reduced, repressed or deleted in the process of the invention can be incorporated into a nucleic acid construct and/or a vector.

[0625] After the above-described reducing, repressing, decreasing or deleting (which as defined above also encompasses the generating of an activity in an organism, i.e. a de novo activity), for example after the introduction and the expression of the RNAi, snRNA, dsRNA, siRNA, miRNA, ta-siRNA, cosuppression molecule, ribozyme, antibody or antisense molecule or ribozyme or other molecule inhibiting the expression or activity, as described in the methods or processes according to the invention, the organism according to the invention, advantageously, a plant, plant tissue or plant cell, is grown and subsequently harvested.

[0626] Examples can be transgenic or non-transgenic plants, cells or protoplasts thereof. Examples of preferred suitable organisms are described in the following paragraphs.

[0627] Suitable host organisms (transgenic organism) for generating the nucleic acid molecule used according to the invention or for the use in the process of the invention, e.g. to be transformed with the nucleic acid construct or the vector (both as described below) of the invention, e.g. conferring the expression of an RNAi, snRNA, dsRNA, siRNA, miRNA, ta-siRNA, ribozyme, or antisense molecule or ribozyme or an other molecule inhibiting the expression or activity, are, in principle, all plants which are suitable for the repression, reduction or deletion of genes, in particular of a nucleic acid molecule comprising a polynucleotide as depicted in column 5 or 7, of Table I or encoding a polypeptide comprising a polypeptide, a consensus sequence or a polypeptide motif as depicted in column 5 or 7 of Table II or IV.

[0628] In the event that the (transgenic) host organism is a plant, plant tissue or plant cell such as plants selected from the group consisting of the families Anacardiaceae, Asteraceae, Apiaceae, Betulaceae, Boraginaceae, Brassicaceae, Bromeliaceae, Caricaceae, Cannabaceae, Convolvulaceae, Chenopodiaceae, Cucurbitaceae, Elaeagnaceae, Ericaceae, Euphorbiaceae, Fabaceae, Geraniaceae, Gramineae, Juglandaceae, Lauraceae, Leguminosae, Linaceae or perennial grass, fodder crops, vegetables, ornamentals and Arabidopsis thaliana, this plant is for example either grown on a solid medium or as cells in an, e.g. liquid, medium, which is known to the skilled worker and suits the organism. Furthermore such plants can be grown in soil or therelike.

[0629] In one embodiment, the nucleic acid molecule used in the process of the invention, in particular the nucleic acid molecule of the invention, or the production or source organism is or originates from a plant, such as a plant selected from the families Aceraceae, Anacardiaceae, Apiaceae, Asteraceae, Brassicaceae, Cactaceae, Cucurbitaceae, Euphorbiaceae, Fabaceae, Malvaceae, Nymphaeaceae, Papaveraceae, Rosaceae, Salicaceae, Solanaceae, Arecaceae, Bromeliaceae, Cyperaceae, Iridaceae, Liliaceae, Orchidaceae, Gentianaceae, Labiaceae, Magnoliaceae, Ranunculaceae, Carifolaceae, Rubiaceae, Scrophulariaceae, Caryophyllaceae, Ericaceae, Polygonaceae, Violaceae, Juncaceae or Poaceae and preferably from a plant selected from the group of the families Apiaceae, Asteraceae, Brassicaceae, Cucurbitaceae, Fabaceae, Papaveraceae, Rosaceae, Solanaceae, Liliaceae or Poaceae.

[0630] Preferred plants are selected from the group consisting of Anacardiaceae such as the genera Pistacia, Mangifera, Anacardium e.g. the species Pistacia vera [pistachios, Pistazie], Mangifer indica [Mango] or Anacardium occidentale [Cashew]; Asteraceae such as the genera Calendula, Carthamus, Centaurea, Cichorium, Cynara, Helianthus, Lactuca, Locusta, Tagetes, Valeriana e.g. the species Calendula officinalis [Marigold], Carthamus tinctorius [safflower], Centaurea cyanus [cornflower], Cichorium intybus [blue daisy], Cynara scolymus [Artichoke], Helianthus annus [sunflower], Lactuca sativa, Lactuca crispa, Lactuca esculenta, Lactuca scariola L. ssp. sativa, Lactuca scariola L. var. integrata, Lactuca scariola L. var. integrifolia, Lactuca sativa subsp. romana, Locusta communis, Valeriana locusta [lettuce], Tagetes lucida, Tagetes erecta or Tagetes tenuifolia [Marigold]; Apiaceae such as the genera Daucus e.g. the species Daucus carota [carrot]; Betulaceae such as the genera Corylus e.g. the species Corylus avellana or Corylus colurna [hazelnut]; Boraginaceae such as the genera Borago e.g. the species Borago officinalis [borage]; Brassicaceae such as the genera Brassica, Melanosinapis, Sinapis, Arabidopsis e.g. the species Brassica napus, Brassica rapa ssp. [canola, oilseed rape, turnip rape], Sinapis arvensis Brassica juncea, Brassica juncea var. juncea, Brassica juncea var. crispifolia, Brassica juncea var. foliosa, Brassica nigra, Brassica sinapioides, Melanosinapis communis [mustard], Brassica oleracea [fodder beet] or Arabidopsis thaliana; Bromeliaceae such as the genera Anana, Bromelia e.g. the species Anana comosus, Ananas ananas or Bromelia comosa [pineapple]; Caricaceae such as the genera Carica e.g. the species Carica papaya [papaya]; Cannabaceae such as the genera Cannabis e.g. the species Cannabis sative [hemp], Convolvulaceae such as the genera Ipomea, Convolvulus e.g. the species Ipomoea batatus, Ipomoea pandurata, Convolvulus batatas, Convolvulus tiliaceus, Ipomoea fastigiata, Ipomoea tiliacea, Ipomoea triloba or Convolvulus panduratus [sweet potato, Man of the Earth, wild potato], Chenopodiaceae such as the genera Beta, i.e. the species Beta vulgaris, Beta vulgaris var. altissima, Beta vulgaris var. Vulgaris, Beta maritima, Beta vulgaris var. perennis, Beta vulgaris var. conditiva or Beta vulgaris var. esculenta [sugar beet]; Cucurbitaceae such as the genera Cucubita e.g. the species Cucurbita maxima, Cucurbita mixta, Cucurbita pepo or Cucurbita moschata [pumpkin, squash]; Elaeagnaceae such as the genera Elaeagnus e.g. the species Olea europaea [olive]; Ericaceae such as the genera Kalmia e.g. the species Kalmia latifolia, Kalmia angustifolia, Kalmia microphylla, Kalmia polifolia, Kalmia occidentalis, Cistus chamaerhodendros or Kalmia lucida [American laurel, broad-leafed laurel, calico bush, spoon wood, sheep laurel, alpine laurel, bog laurel, western bog-laurel, swamp-laurel]; Euphorbiaceae such as the genera Manihot, Janipha, Jatropha, Ricinus e.g. the species Manihot utilissima, Janipha manihot, Jatropha manihot, Manihot aipil, Manihot dulcis, Manihot manihot, Manihot melanobasis, Manihot esculenta [manihot, arrowroot, tapioca, cassava] or Ricinus communis [castor bean, Castor Oil Bush, Castor Oil Plant, Palma Christi, Wonder Tree]; Fabaceae such as the genera Pisum, Albizia, Cathormion, Feuillea, Inga, Pithecolobium, Acacia, Mimosa, Medicajo, Glycine, Dolichos, Phaseolus, Soja e.g. the species Pisum sativum, Pisum arvense, Pisum humile [pea], Albizia berteriana, Albizia julibrissin, Albizia lebbeck, Acacia berteriana, Acacia littoralis, Albizia berteriana, Albizzia berteriana, Cathormion berteriana, Feuillea berteriana, Inga fragrans, Pithecellobium berterianum, Pithecellobium fragrans, Pithecolobium berterianum, Pseudalbizzia berteriana, Acacia julibrissin, Acacia nemu, Albizia nemu, Feuilleea julibrissin, Mimosa julibrissin, Mimosa speciosa, Sericanrda julibrissin, Acacia lebbeck, Acacia macrophylla, Albizia lebbek, Feuilleea lebbeck, Mimosa lebbeck, Mimosa speciosa [bastard logwood, silk tree, East Indian Walnut], Medicago sativa, Medicago falcata, Medicago varia [alfalfa] Glycine max, Dolichos soja, Glycine gracilis, Glycine hispida, Phaseolus max, Soja hispida or Soja max [soybean]; Geraniaceae such as the genera Pelargonium, Cocos, Oleum e.g. the species Cocos nucifera, Pelargonium grossularioides or Oleum cocois [coconut]; Gramineae such as the genera Saccharum e.g. the species Saccharum officinarum; Juglandaceae such as the genera Juglans, Wallia e.g. the species Juglans regia, Juglans ailanthifolia, Juglans sieboldiana, Juglans cinerea, Wallia cinerea, Juglans bixbyi, Juglans californica, Juglans hindsii, Juglans intermedia, Juglans jamaicensis, Juglans major, Juglans microcarpa, Juglans nigra or Wallia nigra [walnut, black walnut, common walnut, persian walnut, white walnut, butternut, black walnut]; Lauraceae such as the genera Persea, Laurus e.g. the species laurel Laurus nobilis [bay, laurel, bay laurel, sweet bay], Persea americana Persea americana, Persea gratissima or Persea persea [avocado]; Leguminosae such as the genera Arachis e.g. the species Arachis hypogaea [peanut]; Linaceae such as the genera Linum, Adenolinum e.g. the species Linum usitatissimum, Linum humile, Linum austriacum, Linum bienne, Linum angustifolium, Linum catharticum, Linum flavum, Linum grandiflorum, Adenolinum grandiflorum, Linum lewisii, Linum narbonense, Linum perenne, Linum perenne var. lewisii, Linum pratense or Linum trigynum [flax, linseed]; Lythrarieae such as the genera Punica e.g. the species Punica granatum [pomegranate]; Malvaceae such as the genera Gossypium e.g. the species Gossypium hirsutum, Gossypium arboreum, Gossypium barbadense, Gossypium herbaceum or Gossypium thurberi [cotton]; Musaceae such as the genera Musa e.g. the species Musa nana, Musa acuminata, Musa paradisiaca, Musa spp. [banana]; Onagraceae such as the genera Camissonia, Oenothera e.g. the species Oenothera biennis or Camissonia brevipes [primrose, evening primrose]; Palmae such as the genera Elacis e.g. the species Elaeis guineensis [oil plam]; Papaveraceae such as the genera Papaver e.g. the species Papaver orientale, Papaver rhoeas, Papaver dubium [poppy, oriental poppy, corn poppy, field poppy, shirley poppies, field poppy, long-headed poppy, long-pod poppy]; Pedaliaceae such as the genera Sesamum e.g. the species Sesamum indicum [sesame]; Piperaceae such as the genera Piper, Artanthe, Peperomia, Steffensia e.g. the species Piper aduncum, Piper amalago, Piper angustifolium, Piper auritum, Piper betel, Piper cubeba, Piper longum, Piper nigrum, Piper retrofractum, Artanthe adunca, Artanthe elongata, Peperomia elongata, Piper elongatum, Steffensia elongata. [Cayenne pepper, wild pepper]; Poaceae such as the genera Hordeum, Secale, Avena, Sorghum, Andropogon, Holcus, Panicum, Oryza, Zea, Triticum e.g. the species Hordeum vulgare, Hordeum jubatum, Hordeum murinum, Hordeum secalinum, Hordeum distichon Hordeum aegiceras, Hordeum hexastichon, Hordeum hexastichum, Hordeum irregulare, Hordeum sativum, Hordeum secalinum [barley, pearl barley, foxtail barley, wall barley, meadow barley], Secale cereale [rye], Avena sativa, Avena fatua, Avena byzantina, Avena fatua var. sativa, Avena hybrida [oat], Sorghum bicolor, Sorghum halepense, Sorghum saccharatum, Sorghum vulgare, Andropogon drummondii, Holcus bicolor, Holcus sorghum, Sorghum aethiopicum, Sorghum arundinaceum, Sorghum caffrorum, Sorghum cernuum, Sorghum dochna, Sorghum drummondii, Sorghum durra, Sorghum guineense, Sorghum lanceolatum, Sorghum nervosum, Sorghum saccharatum, Sorghum subglabrescens, Sorghum verticilliflorum, Sorghum vulgare, Holcus halepensis, Sorghum miliaceum millet, Panicum militaceum [Sorghum, millet], Oryza sativa, Oryza latifolia [rice], Zea mays [corn, maize] Triticum aestivum, Triticum durum, Triticum turgidum, Triticum hybernum, Triticum macha, Triticum sativum or Triticum vulgare [wheat, bread wheat, common wheat], Proteaceae such as the genera Macadamia e.g. the species Macadamia intergrifolia [macadamia]; Rubiaceae such as the genera Coffea e.g. the species Cofea spp., Coffea arabica, Coffea canephora or Coffea liberica [coffee]; Scrophulariaceae such as the genera Verbascum e.g. the species Verbascum blattaria, Verbascum chaixii, Verbascum densiflorum, Verbascum lagurus, Verbascum longifolium, Verbascum lychnitis, Verbascum nigrum, Verbascum olympicum, Verbascum phlomoides, Verbascum phoenicum, Verbascum pulverulentum or Verbascum thapsus [mullein, white moth mullein, nettle-leaved mullein, dense-flowered mullein, silver mullein, long-leaved mullein, white mullein, dark mullein, greek mullein, orange mullein, purple mullein, hoary mullein, great mullein]; Solanaceae such as the genera Capsicum, Nicotiana, Solanum, Lycopersicon e.g. the species Capsicum annuum, Capsicum annuum var. glabriusculum, Capsicum frutescens [pepper], Capsicum annuum [paprika], Nicotiana tabacum, Nicotiana alata, Nicotiana attenuata, Nicotiana glauca, Nicotiana langsdorffii, Nicotiana obtusifolia, Nicotiana quadrivalvis, Nicotiana repanda, Nicotiana rustica, Nicotiana sylvestris [tobacco], Solanum tuberosum [potato], Solanum melongena [egg-plant] (Lycopersicon esculentum, Lycopersicon lycopersicum, Lycopersicon pyriforme, Solanum integrifolium or Solanum lycopersicum [tomato]; Sterculiaceae such as the genera Theobroma e.g. the species Theobroma cacao [cacao]; Theaceae such as the genera Camellia e.g. the species Camellia sinensis) [tea].

[0631] All abovementioned host organisms are also usable as source organisms for the nucleic acid molecule used in the process of the invention, e.g. the nucleic acid molecule of the invention.

[0632] Preferred are crop plants and in particular plants mentioned herein as host plants such as the families and genera mentioned above for example preferred the species Anacardium occidentale, Calendula officinalis, Carthamus tinctorius, Cichorium intybus, Cynara scolymus, Helianthus annus, Tagetes lucida, Tagetes erecta, Tagetes tenuifolia; Daucus carota; Corylus avellana, Corylus colurna, Borago officinalis; Brassica napus, Brassica rapa ssp., Sinapis arvensis, Brassica juncea, Brassica juncea var. juncea, Brassica juncea var. crispifolia, Brassica juncea var. foliosa, Brassica nigra, Brassica sinapioides, Melanosinapis communis, Brassica oleracea, Arabidopsis thaliana, Anana comosus, Ananas ananas, Bromelia comosa, Carica papaya, Cannabis sative, Ipomoea batatus, Ipomoea pandurata, Convolvulus batatas, Convolvulus tiliaceus, Ipomoea fastigiata, Ipomoea tiliacea, Ipomoea triloba, Convolvulus panduratus, Beta vulgaris, Beta vulgaris var. altissima, Beta vulgaris var. vulgaris, Beta maritima, Beta vulgaris var. perennis, Beta vulgaris var. conditiva, Beta vulgaris var. esculenta, Cucurbita maxima, Cucurbita mixta, Cucurbita pepo, Cucurbita moschata, Olea europaea, Manihot utilissima, Janipha manihot, Jatropha manihot, Manihot aipil, Manihot dulcis, Manihot manihot, Manihot melanobasis, Manihot esculenta, Ricinus communis, Pisum sativum, Pisum arvense, Pisum humile, Medicago sativa, Medicago falcata, Medicago varia, Glycine max, Dolichos soja, Glycine gracilis, Glycine hispida, Phaseolus max, Soja hispida, Soja max, Cocos nucifera, Pelargonium grossularioides, Oleum cocoas, Laurus nobilis, Persea americana, Arachis hypogaea, Linum usitatissimum, Linum humile, Linum austriacum, Linum bienne, Linum angustifolium, Linum catharticum, Linum flavum, Linum grandiflorum, Adenolinum grandiflorum, Linum lewisii, Linum narbonense, Linum perenne, Linum perenne var. lewisii, Linum pratense, Linum trigynum, Punica granatum, Gossypium hirsutum, Gossypium arboreum, Gossypium barbadense, Gossypium herbaceum, Gossypium thurberi, Musa nana, Musa acuminata, Musa paradisiaca, Musa spp., Elaeis guineensis, Papaver orientale, Papaver rhoeas, Papaver dubium, Sesamum indicum, Piper aduncum, Piper amalago, Piper angustifolium, Piper auritum, Piper betel, Piper cubeba, Piper longum, Piper nigrum, Piper retrofractum, Artanthe adunca, Artanthe elongata, Peperomia elongata, Piper elongatum, Steffensia elongata, Hordeum vulgare, Hordeum jubatum, Hordeum murinum, Hordeum secalinum, Hordeum distichon Hordeum aegiceras, Hordeum hexastichon, Hordeum hexastichum, Hordeum irregulare, Hordeum sativum, Hordeum secalinum, Avena sativa, Avena fatua, Avena byzantina, Avena fatua var. sativa, Avena hybrida, Sorghum bicolor, Sorghum halepense, Sorghum saccharatum, Sorghum vulgare, Andropogon drummondii, Holcus bicolor, Holcus sorghum, Sorghum aethiopicum, Sorghum arundinaceum, Sorghum caffrorum, Sorghum cernuum, Sorghum dochna, Sorghum drummondii, Sorghum durra, Sorghum guineense, Sorghum lanceolatum, Sorghum nervosum, Sorghum saccharatum, Sorghum subglabrescens, Sorghum verticilliflorum, Sorghum vulgare, Holcus halepensis, Sorghum miliaceum millet, Panicum militaceum, Zea mays, Triticum aestivum, Triticum durum, Triticum turgidum, Triticum hybernum, Triticum macha, Triticum sativum or Triticum vulgare, Cofea spp., Coffea arabica, Coffea canephora, Coffea liberica, Capsicum annuum, Capsicum annuum var. glabriusculum, Capsicum frutescens, Capsicum annuum, Nicotiana tabacum, Solanum tuberosum, Solanum melongena, Lycopersicon esculentum, Lycopersicon lycopersicum, Lycopersicon pyriforme, Solanum integrifolium, Solanum lycopersicum, Theobroma cacao or Camellia sinensis.

[0633] Particular preferred plants are plants selected from the group consisting of maize, soja, canola, wheat, barley, triticale, rice, linseed, sunflower, hemp, borage, oil palm, coconut, evening primrose, peanut, sufflower, potato and Arabidopsis.

[0634] Other preferred plants are a non-transformed from plants selected from the group consisting of rye, oat, soybean, cotton, rapeseed, manihot, pepper, sunflower, flax, safflower, primrose, rapeseed, turnip rape, tagetes, solanaceous plants, tobacco, eggplant, tomato, Vicia species, pea, alfalfa, coffee, cacao, tea, Salix species, perennial grass and forage crops.

[0635] More preferred plants are a non-transformed Linum plant cell, preferably Linum usitatissimum, more preferably the variety Brigitta, Golda, Gold Merchant, Helle, Juliel, Olpina, Livia, Marlin, Maedgold, Sporpion, Serenade, Linus, Taunus, Lifax or Liviola, a non-transformed Heliantus plant cell, preferably Heliantus annuus, more preferably the variety Aurasol, Capella, Flavia, Flores, Jazzy, Palulo, Pegasol, PIR64A54, Rigasol, Sariuca, Sideral, Sunny, Alenka, Candisol or Floyd, or a non-transformed Brassica plant cell, preferably Brassica napus, more preferably the variety Dorothy, Evita, Heros, Hyola, Kimbar, Lambada, Licolly, Liconira, Licosmos, Lisonne, Mistral, Passat, Serator, Siapula, Sponsor, Star, Caviar, Hybridol, Baical, Olga, Lara, Doublol, Karola, Falcon, Spirit, Olymp, Zeus, Libero, Kyola, Licord, Lion, Lirajet, Lisbeth, Magnum, Maja, Mendel, Mica, Mohican, Olpop, Ontarion, Panthar, Prinoe, Pronio, Susanna, Talani, Titan, Transfer, Wiking, Woltan, Zeniah, Artus, Contact or Smart.

[0636] In one embodiment of the invention transgenic plants are selected from the group comprising corn, soy, oil seed rape (including canola and winter oil seed reap), cotton, wheat and rice.

[0637] All abovementioned host plants are also usable as source organisms for isolation or identification of the nucleic acid molecule or polypeptide which activity is to be reduced in the process of the invention or of a functional equivalent thereof. Maize, soja, canola, hemp, borage, oil palm, coconut, evening primrose, peanut, sufflower, wheat, barley, triticale, rice, linseed, sunflower, potato and Arabidopsis are preferred source plants.

[0638] The increase of tolerance and/or resistance to environmental stress and increase in biomass production as compared to a corresponding non-transformed wild type plant are in a plant used in the process of the invention may be increased according to the process of the invention by at least a factor of 1.1, preferably at least a factor of 1.5; 2; or 5, especially preferably by at least a factor of 10 or 30, very especially preferably by at least a factor of 50, in comparison with the wild type, control or reference.

[0639] In a preferred embodiment, the present invention relates to a process for increasing the tolerance and/or resistance to environmental stress and the biomass production as compared to a corresponding non-transformed wild type plant comprising the reducing, repressing, decreasing or deleting of the activity of a nucleic acid molecule comprising a polynucleotide having the nucleotide sequence as depicted in column 5 or 7 of Table I or of a homolog thereof or comprising the reducing, repressing, decreasing or deleting of the activity of a polypeptide comprising a polypeptide having the amino acid sequence as depicted in column 5 or 7 of Table II or comprising a consensus sequence or a polypeptide motif as depicted in column 7 of table IV or of a homolog thereof as described herein.

[0640] Accordingly, in another preferred embodiment, the present invention relates to a process for increasing the tolerance and/or resistance to environmental stress and the biomass production as compared to a corresponding non-transformed wild type plant comprising reducing, repressing, decreasing or deleting the activity or expression of at least one nucleic acid molecule, comprising a nucleic acid molecule which is selected from the group consisting of:
[0641] a) an isolated nucleic acid molecule encoding the polypeptide as depicted in column 5 or 7 of Table II or comprising a consensus sequence or polypeptide motif as depicted in column 7 of Table IV;
[0642] b) an isolated nucleic acid molecule as depicted in column 5 or 7 of Table I;
[0643] c) an isolated nucleic acid molecule, which, as a result of the degeneracy of the genetic code, can be derived from a polypeptide sequence as depicted in column 5 or 7 of Table II or comprising a consensus sequence or polypeptide motif as depicted in column 7 of Table IV;
[0644] d) an isolated nucleic acid molecule having at least 30% identity with the nucleic acid molecule sequence of a polynucleotide comprising the nucleic acid molecule as depicted in column 5 or 7 of Table I;
[0645] e) an isolated nucleic acid molecule encoding a polypeptide having at least 30% identity with the amino acid sequence of the polypeptide encoded by the nucleic acid molecule of (a) to (c) and having the activity represented by a protein as depicted in column 5 Table II;
[0646] f) an isolated nucleic acid molecule encoding a polypeptide which is isolated with the aid of monoclonal or polyclonal antibodies made against a polypeptide encoded by one of the nucleic acid molecules of (a) to (e) and having the activity represented by the protein as depicted in column 5 of Table II;
[0647] g) an isolated nucleic acid molecule encoding a polypeptide comprising the consensus sequence or the polypeptide motif as depicted in column 7 of Table IV and preferably having the activity represented by a protein as depicted in column 5 Table II;
[0648] h) an isolated nucleic acid molecule encoding a polypeptide having the activity represented by the protein as depicted in column 5 of Table II;
[0649] i) an isolated nucleic acid molecule encoding a polypeptide, the polypeptide being derived by substituting, deleting and/or adding one or more amino acids of the amino acid sequence of the polypeptide encoded by the nucleic acid molecules (a) to (c);
[0650] j) an isolated nucleic acid molecule which is obtainable by screening a suitable nucleic acid library, e.g. a library derived from a cDNA or a genomic library, under stringent hybridization conditions with a probe comprising a complementary sequence of a nucleic acid molecule of (a) or (b) or with a fragment thereof, having at least 15 nt, preferably 20 nt, 30 nt, 50 nt, 100 nt, 200 nt or 500 nt of a nucleic acid molecule complementary to a nucleic acid molecule sequence characterized in (a) to (d) and encoding a polypeptide having the activity represented by a protein as depicted in column 5 of Table II; and

[0651] or which comprises a sequence which is complementary thereto;

[0652] or reducing, repressing, decreasing or deleting of a expression product of a nucleic acid molecule comprising a nucleic acid molecule as depicted in (a) to (j), e.g. a polypeptide comprising a polypeptide as depicted in column 5 or 7 of Table II or comprising a consensus sequence or polypeptide motif as depicted in column 7 of Table IV;

[0653] and whereby in a preferred embodiment said nucleic acid molecule or polypeptide confers at least one of the activities shown in [0024.1.1.1].

[0654] In one embodiment, the nucleic acid molecule used in the process distinguishes over the sequence as depicted in column 5 or 7 of Table I A or B by at least one or more nucleotides or does not consist of the sequence as depicted in column 5 or 7 of Table I A or B.

[0655] In one embodiment, the nucleic acid molecule of the present invention is less than 100%, 99.999%, 99.99%, 99.9% or 99% identical to the sequence as depicted in column 5 or 7 of Table I A or B. In another embodiment, the nucleic acid molecule does not consist of the sequence as depicted in column 5 or 7 of Table I A or B.

[0656] Nucleic acid molecules, which are advantageous for the process according to the invention and which encode nucleic acid molecules with the activity represented by an expression product of a nucleic acid molecule comprising a nucleic acid molecule as indicated in column 5 or 7 of Table I, preferable represented by a protein as indicated in column 5 or 7 of Table I B, more preferred represented by the protein as indicated in column 5 of Table I B and conferring the increase in the tolerance and/or resistance to environmental stress and in the biomass production as compared to a corresponding non-transformed wild type plant after reducing or deleting their activity, can be determined from generally accessible databases.

[0657] As well, nucleic acid molecules, which are advantageous for the process according to the invention and which encode polypeptides with the activity represented by the protein comprising a polypeptide as indicated in column 5 or 7 of Table II or a consensus sequence or a polypeptide as motif indicated in column 7 of Table IV, preferable represented by the protein as indicated in column 5 or 7 of Table II B or comprising a consensus sequence or a polypeptide motif as indicated in column 7 of Table IV, more preferred by the protein indicated in column 5 of Table II B and conferring the increased tolerance and/or resistance to environmental stress and increased biomass production as compared to a corresponding non-transformed wild type plant can be determined from generally accessible databases.

[0658] Those databases, which must be mentioned, in particular in this context are general gene databases such as the EMBL database (Stoesser G. et al., Nucleic Acids Res 2001, Vol. 29, 17-21), the GenBank database (Benson D. A. et al., Nucleic Acids Res 2000, Vol. 28, 15-18), or the PIR database (Barker W. C. et al., Nucleic Acids Res. 1999, Vol. 27, 39-43). It is furthermore possible to use organism-specific gene databases for determining advantageous sequences, in the case of yeast for example advantageously the SGD database (Cherry J. M. et al., Nucleic Acids Res. 1998, Vol. 26, 73-80) or the MIPS database (Mewes H. W. et al., Nucleic Acids Res. 1999, Vol. 27, 44-48), in the case of E. coli the GenProtEC database (http://web.bham.ac.uk/bcm4ght6/res.html), and in the case of Arabidopsis the TAIR-database (Huala, E. et al., Nucleic Acids Res. 2001 Vol. 29(1), 102-5) or the MIPS database.

[0659] Further, in another embodiment of the present invention, the molecule to be reduced in the process of the invention is novel. Thus, the present invention also relates to the novel nucleic acid molecule, the “nucleic acid molecule of the invention” or the “polynucleotide of the invention”

[0660] The nucleic acid molecules used in the process according to the invention take the form of isolated nucleic acid sequences, which encode polypeptides with the activity of a protein as indicated in column 5 or 7 of Table II A or B, preferable represented by a novel protein as indicated in column 7 of Table II B, and enabling the increase in tolerance and/or resistance to environmental stress and increase in biomass production as compared to a corresponding non-transformed wild type plant by reducing, repressing, decreasing or deleting their activity.

[0661] Accordingly, in one embodiment, the invention relates to an isolated nucleic acid molecule conferring the expression of a product, the reduction, repression or deletion of which results in an increase of tolerance and/or resistance to environmental stress and increase of biomass production as compared to a corresponding non-transformed wild type plant and which comprises a nucleic acid molecule selected from the group consisting of:
[0662] a) an isolated nucleic acid molecule encoding the polypeptide as depicted in column 5 or 7 of Table II, preferably of Table II B or comprising the consensus sequence or the polypeptide motif, as depicted in column 7 Table IV;
[0663] b) an isolated nucleic acid molecule as depicted in column 5 or 7 of Table I, preferably of Table I B;
[0664] c) an isolated nucleic acid molecule, which, as a result of the degeneracy of the genetic code, can be derived from a polypeptide sequence as depicted in column 5 or 7 of Table II, preferably of Table II B or from a polypeptide comprising the consensus sequence or the polypeptide motif, as depicted in column 7 Table IV;
[0665] d) an isolated nucleic acid molecule having at least 30% identity with the nucleic acid molecule sequence of a polynucleotide comprising the nucleic acid molecule as depicted in column 5 or 7 of Table I, preferably of Table I B;
[0666] e) an isolated nucleic acid molecule encoding a polypeptide having at least 30% identity with the amino acid sequence of the polypeptide encoded by the nucleic acid molecule of (a) to (c) and having the activity represented by a protein as depicted in column 5 of Table II;
[0667] f) an isolated nucleic acid molecule encoding a polypeptide which is isolated with the aid of monoclonal or polyclonal antibodies directed against a polypeptide encoded by one of the nucleic acid molecules of (a) to (e) and having the activity represented by the protein as depicted in column 5 of Table II;
[0668] g) an isolated nucleic acid molecule encoding a polypeptide comprising the consensus sequence or a polypeptide motif as depicted in column 7 of Table IV;
[0669] h) an isolated nucleic acid molecule encoding a polypeptide having the activity represented by the protein as depicted in column 5 of Table II;
[0670] i) an isolated nucleic acid molecule which comprises a polynucleotide, which is obtained by amplifying a cDNA library or a genomic library using the primers as depicted in column 7 of Table III, which do not start at their 5 prime end with the nucleotides ATA;
[0671] j) an isolated nucleic acid molecule encoding a polypeptide, the polypeptide being derived by substituting, deleting and/or adding one or more amino acids of the amino acid sequence of the polypeptide encoded by the nucleic acid molecules (a) to (c); and
[0672] k) an isolated nucleic acid molecule which is obtainable by screening a suitable nucleic acid library under stringent hybridization conditions with a probe comprising a complementary sequence of a nucleic acid molecule of (a) or (b) or with a fragment thereof, having at least 15 nt, preferably 20 nt, 30 nt, 50 nt, 100 nt, 200 nt or 500 nt of a nucleic acid molecule complementary to a nucleic acid molecule sequence characterized in (a) to (d) and encoding a polypeptide having the activity represented by a protein as depicted in column 5 of Table II; or which comprises a sequence which is complementary thereto;

[0673] whereby the nucleic acid molecule according to (a) to (k) differs at least in one, five, ten, 20, 50, 100 or more nucleotides from the sequence as depicted in column 5 or 7 of Table I A and/or which encodes a protein which differs at least in one, five, ten, 20, 30, 50 or more amino acids from the polypeptide sequences as depicted in column 5 or 7 of Table II A.

[0674] Accordingly, in another embodiment, the nucleic acid molecule of the invention does not consist of the sequence as depicted in column 5 or 7 of Table I A.

[0675] In a further embodiment, the nucleic acid molecule of the present invention is at least 30% identical to the nucleic acid sequence as depicted in column 5 or 7 of Table I A or B and less than 100%, preferably less than 99.999%, 99.99% or 99.9%, more preferably less than 99%, 98%, 97%, 96% or 95% identical to the sequence as depicted in column 5 or 7 of Table I A

[0676] As used herein, the term “the nucleic acid molecule of the invention” refers to said nucleic acid molecule as described in this paragraph.

[0677] In one embodiment, the present invention also relates to a novel polypeptide, thus to the “the polypeptide of the invention” or the “protein of the invention”.

[0678] Preferably, the polypeptide does not comprise a polypeptide as depicted in column 5 or 7 of Table II A. Preferably, the polypeptide of the inventions protein differs at least in one, five, ten, 20, 30, 50 or more amino acids from the polypeptide sequences as depicted in column 5 or 7 of Table II A. In a further embodiment, the polypeptide of the present invention is at least 30% identical to protein sequence as depicted in column 5 or 7 of Table II A or B and less than 100%, preferably less than 99.999%, 99.99% or 99.9%, more preferably less than 99%, 98%, 97%, 96% or 95% identical to the sequence as depicted in column 5 or 7 of Table II A.

[0679] As used herein, the terms “the molecule to be reduced in the process of the present invention”, “the nucleic acid molecule to be reduced in the process of the present invention” or “the polypeptide to be reduced in the process of the present invention” comprise the terms “the nucleic acid molecule of the invention” or “the polypeptide of the invention”, respectively.

[0680] In one embodiment, the nucleic acid molecule originates advantageously from a plant.

[0681] As mentioned, in one embodiment, crop plants are preferred, e.g. above host plants.

[0682] However, it is also possible to use artificial sequences, which differ preferably in one or more bases from the nucleic acid sequences found in organisms, or in one or more amino acid molecules from polypeptide sequences found in organisms, to carry out the invention, e.g. to repress, inactive or down regulate an activity selected from the group consisting of: 1-phosphatidylinositol 4-kinase, amino acid permease (AAP1), At3g55990-protein, At5g40590-protein, ATP-dependent peptidase/ATPase/nucleoside-triphosphatase/serine-type endopeptidase, DC1 domain-containing protein/protein-binding protein/zinc ion binding protein, DNA binding protein/transcription factor, hydro-lyase/aconitate hydratase, metalloexopeptidase (MAP1C), methyltransferase, nitrate transporter (ATNRT2.3), nitrate/chlorate transporter (NRT1.1), pectate lyase protein/powdery mildew susceptibility protein (PMR6), peptidase/ubiquitin-protein ligase/zinc ion binding protein (JR700), proton-dependent oligopeptide transport protein, transcription factor, and ubiquitin conjugating enzyme/ubiquitin-like activating enzyme, e.g. to repress, inactive or down regulate an activity of the nucleic acid molecule or polypeptide, conferring above-mentioned activity, e.g. conferring the increased tolerance and/or resistance to environmental stress and increased biomass production as compared to a corresponding non-transformed wild type plant after reducing, repressing, decreasing or deleting its expression or activity.

[0683] In the process according to the invention nucleic acid molecules can be used, which, if appropriate, contain synthetic, non-natural or modified nucleotide bases, which can be incorporated into DNA or RNA. Said synthetic, non-natural or modified bases can for example increase the stability of the nucleic acid molecule outside or inside a cell. The nucleic acid molecules used in the process of the invention can contain the same modifications as aforementioned.

[0684] As used in the present context the nucleic acid molecule can also encompass the untranslated sequence located at the 3′ and at the 5′ end of the coding gene region, for example at least 500, preferably 200, especially preferably 100, nucleotides of the sequence upstream of the 5′ end of the coding region and at least 100, preferably 50, especially preferably 20, nucleotides of the sequence downstream of the 3′ end of the coding gene region. In the event for example the RNAi or antisense technology is used also the 5′- and/or 3′-regions can advantageously be used.

[0685] In one embodiment, it is advantageous to choose the coding region for cloning and expression of repression constructs, like antisense, RNAi oder cosuppression constructs, in order to target several or all of the orthologous genes, which otherwise could compensate for each other.

[0686] In another embodiment, it is advantageous to use very gene specific sequences originating from the 3′or 5′ prime region for the construction of repression constructs, with the aim to specifically reduce the activity or expression level of only the target gene and, thus, to avoid side effects by repressing other non-target genes (so called off-targets)

[0687] The person skilled in the art is familiar with analyzing the actual genomic situation in his target organism. The necessary information can be achieved by search in relevant sequence databases or performing genomic southern blottings disclosing the genomic structure of the target organism and eventually combining these results with informations about expression levels of the target genes disclosed herein, e.g. obtained by array experiments, northern blottings, or RT qPCR experiments.

[0688] Preferably, the nucleic acid molecule used in the process according to the invention or the nucleic acid molecule of the invention is an isolated nucleic acid molecule.

[0689] An “isolated” polynucleotide or nucleic acid molecule is separated from other polynucleotides or nucleic acid molecules, which are present in the natural source of the nucleic acid molecule. An isolated nucleic acid molecule may be a chromosomal fragment of several kb, or preferably, a molecule only comprising the coding region of the gene. Accordingly, an isolated nucleic acid molecule may comprise chromosomal regions, which are adjacent 5′ and 3′ or further adjacent chromosomal regions, but preferably comprises no such sequences which naturally flank the nucleic acid molecule sequence in the genomic or chromosomal context in the organism from which the nucleic acid molecule originates (for example sequences which are adjacent to the regions encoding the 5′- and 3′-UTRs of the nucleic acid molecule). In various embodiments, the isolated nucleic acid molecule used in the process according to the invention may, for example comprise less than approximately 5 kb, 4 kb, 3 kb, 2 kb, 1 kb, 0.5 kb or 0.1 kb nucleotide sequences which naturally flank the nucleic acid molecule in the genomic DNA of the cell from which the nucleic acid molecule originates.

[0690] The nucleic acid molecules used in the process or a part thereof can be isolated using molecular-biological standard techniques and the sequence information provided herein. Also, for example a homologous sequence or homologous, conserved sequence regions at the DNA or amino acid level can be identified with the aid of comparison algorithms. The former can be used as hybridization probes under standard hybridization techniques (for example those described in Sambrook et al., Molecular Cloning: A Laboratory Manual. 2nd Ed., Cold Spring Harbor Laboratory, Cold Spring Harbor Laboratory Press, Cold Spring Harbor, N.Y., 1989) for isolating further nucleic acid sequences useful in this process.

[0691] A nucleic acid molecule encompassing a complete sequence of a molecule which activity is to be reduced in the process of the present invention, e.g. as disclosed in column 5 or 7 of Table I, or a part thereof may additionally be isolated by polymerase chain reaction, oligonucleotide primers based on this sequence or on parts thereof being used. For example, a nucleic acid molecule comprising the complete sequence or part thereof can be isolated by polymerase chain reaction using oligonucleotide primers, which have been generated on the basis of the disclosed sequences. For example, mRNA can be isolated from cells, for example by means of the guanidinium thiocyanate extraction method of Chirgwin et al. (1979) Biochemistry 18:5294-5299, and cDNA can be generated by means of reverse transcriptase (for example Moloney MLV reverse transcriptase, available from Gibco/BRL, Bethesda, Md., or AMV reverse transcriptase, obtainable from Seikagaku America, Inc., St. Petersburg, Fla.).

[0692] Synthetic oligonucleotide primers for the amplification by means of polymerase chain reaction can be generated on the basis of a sequences shown herein, for example from the molecules comprising the molecules as depicted in column 5 or 7 of Table I or derived from the molecule as depicted in column 5 or 7 of Table I or II. Such primers can be used to amplify nucleic acids sequences for example from cDNA libraries or from genomic libraries and identify nucleic acid molecules, which are useful in the inventive process. For example, the primers as depicted in column 7 of Table III, which do not start at their 5 prime end with the nucleotides ATA, are used.

[0693] Moreover, it is possible to identify conserved regions from various organisms by carrying out protein sequence alignments with the polypeptide encoded by the nucleic acid molecule to be reduced according to the process of the invention, in particular with the sequences encoded by the nucleic acid molecule as depicted in column 5 or 7 of Table II, from which conserved regions, and in turn, degenerate primers can be derived.

[0694] Conserved regions are those, which show a very little variation in the amino acid in one particular position of several homologs from different origin. The consensus sequence and polypeptide motifs as depicted in column 7 of Table IV are derived from said alignments. Moreover, it is possible to identify conserved regions from various organisms by carrying out protein sequence alignments with the polypeptide encoded by the nucleic acid molecule to be reduced according to the process of the invention, in particular with the sequences encoded by the polypeptide molecule as depicted in column 5 or 7 of Table II, from which conserved regions, and in turn, degenerate primers can be derived.

[0695] Conserved regions are those, which show a very little variation in the amino acid in one particular position of several homologs from different origin. The consensus sequences and polypeptide motifs as depicted in column 7 of Table IV are derived from said alignments. In one advantageous embodiment, in the method of the present invention the activity of a polypeptide is decreased comprising or consisting of a consensus sequence or a polypeptide motif as depicted in table IV, column 7 and in one another embodiment, the present invention relates to a polypeptide comprising or consisting of a consensus sequence or a polypeptide motif as depicted in table IV, columns 7 whereby 20 or less, preferably 15 or 10, preferably 9, 8, 7, or 6, more preferred 5 or 4, even more preferred 3, even more preferred 2, even more preferred 1, most preferred 0 of the amino acids positions indicated can be replaced by any amino acid. In one embodiment not more than 15%, preferably 10%, even more preferred 5%, 4%, 3%, or 2%, most preferred 1% or 0% of the amino acid position indicated by a letter are/is replaced by another amino acid. In one embodiment 20 or less, preferably 15 or 10, preferably 9, 8, 7, or 6, more preferred 5 or 4, even more preferred 3, even more preferred 2, even more preferred 1, most preferred 0 amino acids are inserted into a consensus sequence or protein motif.

[0696] The consensus sequence was derived from a multiple alignment of the sequences as listed in table II. The letters represent the one letter amino acid code and indicate that the amino acids are conserved in at least 80% of the aligned proteins. The letter X stands for amino acids, which are not conserved in at least 80% of the aligned sequences. The consensus sequence starts with the first conserved amino acid in the alignment, and ends with the last conserved amino acid in the alignment of the investigated sequences. The number of given X indicates the distances between conserved amino acid residues, e.g. Y-x(21,23)-F means that conserved tyrosine and phenylalanine residues are separated from each other by minimum 21 and maximum 23 amino acid residues in all investigated sequences.

[0697] Conserved domains were identified from all sequences and are described using a subset of the standard Prosite notation, e.g. the pattern Y-x(21,23)-[FW] means that a conserved tyrosine is separated by minimum 21 and maximum 23 amino acid residues from either a phenylalanine or tryptophane. Patterns had to match at least 80% of the investigated proteins.

[0698] Conserved patterns were identified with the software tool MEME version 3.5.1 or manually. MEME was developed by Timothy L. Bailey and Charles Elkan, Dept. of Computer Science and Engineering, University of California, San Diego, USA and is described by Timothy L. Bailey and Charles Elkan [Fitting a mixture model by expectation maximization to discover motifs in biopolymers, Proceedings of the Second International Conference on Intelligent Systems for Molecular Biology, pp. 28-36, AAAI Press, Menlo Park, Calif., 1994]. The source code for the stand-alone program is public available from the San Diego Supercomputer center (http://meme.sdsc.edu).

[0699] For identifying common motifs in all sequences with the software tool MEME, the following settings were used: -maxsize 500000, -nmotifs 15, -evt 0.001, -maxw 60, -distance 1e-3, -minsites number of sequences used for the analysis. Input sequences for MEME were non-aligned sequences in Fasta format. Other parameters were used in the default settings in this software version.

[0700] Prosite patterns for conserved domains were generated with the software tool Pratt version 2.1 or manually. Pratt was developed by Inge Jonassen, Dept. of Informatics, University of Bergen, Norway and is described by Jonassen et al. [I. Jonassen, J. F. Collins and D. G. Higgins, Finding flexible patterns in unaligned protein sequences, Protein Science 4 (1995), pp. 1587-1595; I. Jonassen, Efficient discovery of conserved patterns using a pattern graph, Submitted to CABIOS February 1997]. The source code (ANSI C) for the stand-alone program is public available, e.g. at established Bioinformatic centers like EBI (European Bioinformatics Institute).

[0701] For generating patterns with the software tool Pratt, following settings were used: PL (max Pattern Length): 100, PN (max Nr of Pattern Symbols): 100, PX (max Nr of consecutive x's): 30, FN (max Nr of flexible spacers): 5, FL (max Flexibility): 30, FP (max Flex.Product): 10, ON (max number patterns): 50. Input sequences for Pratt were distinct regions of the protein sequences exhibiting high similarity as identified from software tool MEME. The minimum number of sequences, which have to match the generated patterns (CM, min Nr of Seqs to Match) was set to at least 80% of the provided sequences. Parameters not mentioned here were used in their default settings.

[0702] The Prosite patterns of the conserved domains can be used to search for protein sequences matching this pattern. Various established Bioinformatic centers provide public internet portals for using those patterns in database searches (e.g. PIR [Protein Information Resource, located at Georgetown University Medical Center] or ExPASy [Expert Protein Analysis System]). Alternatively, stand-alone software is available, like the program Fuzzpro, which is part of the EMBOSS software package. For example, the program Fuzzpro not only allows searching for an exact pattern-protein match but also allows to set various ambiguities in the performed search.

[0703] The alignment was performed with the software ClustalW (version 1.83) and is described by Thompson et al. [Thompson, J. D., Higgins, D. G. and Gibson, T. J. (1994) CLUSTAL W: improving the sensitivity of progressive multiple sequence alignment through sequence weighting, positions-specific gap penalties and weight matrix choice. Nucleic Acids Research, 22:4673-4680]. The source code for the stand-alone program is public available from the European Molecular Biology Laboratory; Heidelberg, Germany. The analysis was performed using the default parameters of ClustalW v1.83 (gap open penalty: 10.0; gap extension penalty: 0.2; protein matrix: Gonnet; pprotein/DNA endgap: −1; protein/DNA gapdist: 4).

[0704] Degenerate primers, designed as described above, can then be utilized by PCR for the amplification of fragments of novel coding regions coding for proteins having above-mentioned activity, e.g. conferring the increase of the tolerance and/or resistance to environmental stress and the biomass production as compared to a corresponding non-transformed wild type plant after reducing, repressing, decreasing or deleting the expression or activity of the respective nucleic acid sequence or the protein encoded by said sequence, e.g. which having the activity of a protein encoded by a nucleic acid which activity is to be reduced or deleted in the process of the invention or further functional equivalent or homologues from other organisms.

[0705] These fragments can then be utilized as hybridization probe for isolating the complete gene sequence. As an alternative, the missing 5′ and 3′ sequences can be isolated by means of RACE-PCR. A nucleic acid molecule according to the invention can be amplified using cDNA or, as an alternative, genomic DNA as template and suitable oligonucleotide primers, following standard PCR amplification techniques. The nucleic acid molecule amplified thus can be cloned into a suitable vector and characterized by means of DNA sequence analysis. Oligonucleotides, which correspond to one of the nucleic acid molecules used in the process, can be generated by standard synthesis methods, for example using an automatic DNA synthesizer.

[0706] Nucleic acid molecules which are advantageously for the process according to the invention can be isolated based on their homology to the nucleic acid molecules disclosed herein using the sequences or part thereof as hybridization probe and following standard hybridization techniques under stringent hybridization conditions.

[0707] In this context, it is possible to use, for example, isolated nucleic acid molecules of at least 15, 20, 25, 30, 35, 40, 50, 60 or more nucleotides, preferably of at least 15, 20 or 25 nucleotides in length which hybridize under stringent conditions with the above-described nucleic acid molecules, in particular with those which encompass a nucleotide sequence as depicted in column 5 or 7 of Table I. Nucleic acid molecules with 30, 50, 100, 250 or more nucleotides may also be used.

[0708] The term “homology” means that the respective nucleic acid molecules or encoded proteins are functionally and/or structurally equivalent. The nucleic acid molecules that are homologous to the nucleic acid molecules described above and that are derivatives of said nucleic acid molecules are, for example, variations of said nucleic acid molecules which represent modifications having the same biological function, in particular encoding proteins with the same or substantially the same biological function. They may be naturally occurring variations, such as sequences from other plant varieties or species, or mutations. These mutations may occur naturally or may be obtained by mutagenesis techniques. The allelic variations may be naturally occurring allelic variants as well as synthetically produced or genetically engineered variants. Structurally equivalents can for example be identified by testing the binding of said polypeptide to antibodies or computer based predictions. Structurally equivalent have the similar immunological characteristic, e.g. comprise similar epitopes.

[0709] By “hybridizing” it is meant that such nucleic acid molecules hybridize under conventional hybridization conditions, preferably under stringent conditions such as described by, e.g., Sambrook (Molecular Cloning; A Laboratory Manual, 2^{nd} Edition, Cold Spring Harbor Laboratory Press, Cold Spring Harbor, N.Y. (1989)) or in Current Protocols in Molecular Biology, John Wiley & Sons, N. Y. (1989), 6.3.1-6.3.6.

[0710] According to the invention, DNA as well as RNA molecules of the nucleic acid of the invention can be used as probes. Further, as template for the identification of functional homologues Northern blot assays as well as Southern blot assays can be performed. The Northern blot assay advantageously provides further informations about the expressed gene product: e.g. expression pattern, occurrence of processing steps, like splicing and capping, etc. The Southern blot assay provides additional information about the chromosomal localization and organization of the gene encoding the nucleic acid molecule of the invention.

[0711] A preferred, nonlimiting example of stringent Southern blot hydridization conditions are hybridizations in 6×sodium chloride/sodium citrate (=SSC) at approximately 45° C., followed by one or more wash steps in 0.2×SSC, 0.1% SDS at 50 to 65° C., for example at 50° C., 55° C. or 60° C. The skilled worker knows that these hybridization conditions differ as a function of the type of the nucleic acid and, for example when organic solvents are present, with regard to the temperature and concentration of the buffer. The temperature under “standard hybridization conditions” differs for example as a function of the type of the nucleic acid between 42° C. and 58° C., preferably between 45° C. and 50° C. in an aqueous buffer with a concentration of 0.1×0.5×, 1×, 2×, 3×, 4× or 5×SSC (pH 7.2). If organic solvent(s) is/are present in the abovementioned buffer, for example 50% formamide, the temperature under standard conditions is approximately 40° C., 42° C. or 45° C. The hybridization conditions for DNA:DNA hybrids are preferably for example 0.1×SSC and 20° C., 25° C., 30° C., 35° C., 40° C. or 45° C., preferably between 30° C. and 45° C. The hybridization conditions for DNA:RNA hybrids are preferably for example 0.1×SSC and 30° C., 35° C., 40° C., 45° C., 50° C. or 55° C., preferably between 45° C. and 55° C. The abovementioned hybridization temperatures are determined for example for a nucleic acid approximately 100 bp (=base pairs) in length and a G+C content of 50% in the absence of formamide. The skilled worker knows to determine the hybridization conditions required with the aid of textbooks, for example the ones mentioned above, or from the following textbooks: Sambrook et al., “Molecular Cloning”, Cold Spring Harbor Laboratory, 1989; Hames and Higgins (Ed.) 1985, “Nucleic Acids Hybridization: A Practical Approach”, IRL Press at Oxford University Press, Oxford; Brown (Ed.) 1991, “Essential Molecular Biology: A Practical Approach”, IRL Press at Oxford University Press, Oxford.

[0712] A further example of one such stringent hybridization condition is hybridization at 4×SSC at 65° C., followed by a washing in 0.1×SSC at 65° C. for one hour. Alternatively, an exemplary stringent hybridization condition is in 50% formamide, 4×SSC at 42° C. Further, the conditions during the wash step can be selected from the range of conditions delimited by low-stringency conditions (approximately 2×SSC at 50° C.) and high-stringency conditions (approximately 0.2×SSC at 50° C., preferably at 65° C.) (20×SSC: 0.3M sodium citrate, 3M NaCl, pH 7.0). In addition, the temperature during the wash step can be raised from low-stringency conditions at room temperature, approximately 22° C., to higher-stringency conditions at approximately 65° C.

[0713] Both of the parameters salt concentration and temperature can be varied simultaneously, or else one of the two parameters can be kept constant while only the other is varied. Denaturants, for example formamide or SDS, may also be employed during the hybridization. In the presence of 50% formamide, hybridization is preferably effected at 42° C. Relevant factors like i) length of treatment, ii) salt conditions, iii) detergent conditions, iv) competitor DNAs, v) temperature and vi) probe selection can combined case by case so that not all possibilities can be mentioned herein.

[0714] Some examples of conditions for DNA hybridization (Southern blot assays) and wash step are shown hereinbelow:
[0715] (1) Hybridization conditions can be selected, for example, from the following conditions:
[0716] a) 4×SSC at 65° C.,
[0717] b) 6×SSC at 45° C.,
[0718] c) 6×SSC, 100 mg/ml denatured fragmented fish sperm DNA at 68° C.,
[0719] d) 6×SSC, 0.5% SDS, 100 mg/ml denatured salmon sperm DNA at 68° C.,
[0720] e) 6×SSC, 0.5% SDS, 100 mg/ml denatured fragmented salmon sperm DNA, 50% formamide at 42° C.,
[0721] f) 50% formamide, 4×SSC at 42° C.,
[0722] g) 50% (vol/vol) formamide, 0.1% bovine serum albumin, 0.1% Ficoll, 0.1% polyvinylpyrrolidone, 50 mM sodium phosphate buffer pH 6.5, 750 mM NaCl, 75 mM sodium citrate at 42° C.,
[0723] h) 2× or 4×SSC at 50° C. (low-stringency condition), or
[0724] i) 30 to 40% formamide, 2× or 4×SSC at 42° C. (low-stringency condition).
[0725] (2) Wash steps can be selected, for example, from the following conditions:
[0726] a) 0.015 M NaCl/0.0015 M sodium citrate/0.1% SDS at 50° C.
[0727] b) 0.1×SSC at 65° C.
[0728] c) 0.1×SSC, 0.5% SDS at 68° C.
[0729] d) 0.1×SSC, 0.5% SDS, 50% formamide at 42° C.
[0730] e) 0.2×SSC, 0.1% SDS at 42° C.
[0731] f) 2×SSC at 65° C. (low-stringency condition).
[0732] g) 0.2×SSC, 0.1% SDS at 60° C. (medium-high stringency conditions), or
[0733] h) 0.1×SSC, 0.1% SDS at 60° C. (medium-high stringency conditions), or
[0734] i) 0.2×SSC, 0.1% SDS at 65° C. (high stringency conditions), or
[0735] j) 0.1×SSC, 0.1% SDS at 65° C. (high stringency conditions)

[0736] Polypeptides or nucleic acid molecules having above-mentioned activity, e.g. conferring the increased tolerance and/or resistance to environmental stress and increased biomass production as compared to a corresponding non-transformed wild type plant derived from other organisms, can be encoded by other DNA molecules, which hybridize to a molecule as depicted in column 5 or 7 of Table I, or comprising it, under relaxed hybridization conditions and which code on expression for peptides or nucleic acids which activity needs to reduced or deleted to confer an increase of the tolerance and/or resistance to environmental stress and the biomass production as compared to a corresponding non-transformed wild type plant.

[0737] Preferably, the polypeptides or polynucleotides have further biological activities of the protein or the nucleic acid molecule comprising a molecule as depicted in column 5 or 7 of Table I, II or IV, respectively.

[0738] Relaxed hybridization conditions can for example used in Southern Blotting experiments.

[0739] Some applications have to be performed at low stringency hybridization conditions, without any consequences for the specificity of the hybridization. For example, a Southern blot analysis of total DNA could be probed with a nucleic acid molecule of the present invention and washed at low stringency (55° C. in 2×SSPE, 0.1% SDS). The hybridisation analysis could reveal a simple pattern of only genes encoding polypeptides of the present invention, e.g. having herein-mentioned activity. A further example of such low-stringent hybridization conditions is 4×SSC at 50° C. or hybridization with 30 to 40% formamide at 42° C. Such molecules comprise those which are fragments, analogues or derivatives of the nucleic acid molecule to be reduced in the process of the invention or encoding the polypeptide to be reduced in the process of the invention and differ, for example, by way of amino acid and/or nucleotide deletion(s), insertion(s), substitution(s), addition(s) and/or recombination(s) or any other modification(s) known in the art either alone or in combination from the above-described amino acid sequences or said (underlying) nucleotide sequence(s).

[0740] However, it is preferred to use high stringency hybridisation conditions.

[0741] Hybridization should advantageously be carried out with fragments of at least 5, 10, 15, 20, 25, 30, 35 or 40 bp, advantageously at least 50, 60, 70 or 80 bp, preferably at least 90, 100 or 110 bp. Most preferably are fragments of at least 15, 20, 25 or 30 bp. Preferably are also hybridizations with at least 100 bp or 200, very especially preferably at least 400 bp in length. In an especially preferred embodiment, the hybridization should be carried out with the entire nucleic acid sequence with conditions described above.

[0742] The terms “fragment”, “fragment of a sequence” or “part of a sequence” mean a truncated sequence of the original sequence referred to. The truncated sequence (nucleic acid or protein sequence) can vary widely in length; the minimum size being a sequence of sufficient size to provide a sequence or sequence fragment with at least 15, 20, 21, 22, 23, 24, 25, 26, 27, 28, 29, 30 bp in length with at least 90, 91, 92, 93, 94, 95, 96, 97, 98 or 99% identity preferably 100% identity with a fragment of a nucleic acid molecule described herein for the use in the process of the invention, e.g. a fragment of the nucleic acid molecules which activity is to be reduced in the process of the invention. Said truncated sequences can as mentioned vary widely in length from 15 by up to 2 kb or more, advantageously the sequences have a minimal length of 15, 20, 25, 30, 35 or 40 bp, while the maximum size is not critical. 100, 200, 300, 400, 500 or more base pair fragments can be used. In some applications, the maximum size usually is not substantially greater than that required to provide the complete gene function(s) of the nucleic acid sequences. Such sequences can advantageously been used for the repression, reduction, decrease or deletion of the activity to be reduced in the process of the invention, by for example the antisense, RNAi, snRNA, dsRNA, siRNA, miRNA, ta-siRNA, cosuppression molecule, ribozyme etc.-technology.

[0743] For the reduction, decrease or deletion of the activity of a nucleic acid molecule comprising a nucleic acid molecule as depicted in column 5 or 7 of Table I and/or a polypeptide comprising a polypeptide as depicted in column 5 or 7 of Table II or a consensus sequence or a polypeptide motif as depicted in column 7 of Table IV also the promotor regions of the disclosed nucleic acid sequences can be used. The skilled worker knows how to clone said promotor regions.

[0744] Typically, the truncated amino acid molecule will range from about 5 to about 310 amino acids in length. More typically, however, the sequence will be a maximum of about 250 amino acid in length, preferably a maximum of about 200 or 100 amino acid. It is usually desirable to select sequences of at least about 10, 12 or 15 amino acid, up to a maximum of about 20 or 25 amino acids.

[0745] The term “one or several amino acid” relates to at least one amino acid but not more than that number of amino acid, which would result in a homology of below 50% identity. Preferably, the identity is more than 70% or 80%, more preferred are 85%, 90%, 91%, 92%, 93%, 94% or 95%, even more preferred are 96%, 97%, 98%, or 99% identity.

[0746] Further, the nucleic acid molecule used in the process of the invention comprises a nucleic acid molecule, which is a complement of one of the nucleotide sequences of above mentioned nucleic acid molecules or a portion thereof. A nucleic acid molecule which is complementary to one of the nucleotide sequences as depicted in column 5 or 7 of Table I or a nucleic acid molecule comprising said sequence is one which is sufficiently complementary to said nucleotide sequences such that it can hybridize to said nucleotide sequences, thereby forming a stable duplex.

[0747] Preferably, the hybridisation is performed under stringent hybrization conditions. However, a complement of one of the herein disclosed sequences is preferably a sequence complement thereto according to the base pairing of nucleic acid molecules well known to the skilled person. For example, the bases A and G undergo base pairing with the bases T and U or C, resp. and vice versa. Modifications of the bases can influence the base-pairing partner.

[0748] The nucleic acid molecule which activity is to be reduced in the process of the invention, in particular the nucleic acid molecule of the invention comprises a nucleotide sequence which is at least about 30%, 35%, 40% or 45%, preferably at least about 50%, 55%, 60% or 65%, more preferably at least about 70%, 80%, or 90%, and even more preferably at least about 95%, 97%, 98%, 99% or more homologous to a nucleotide sequence comprising a nucleic acid molecule as depicted in column 5 or 7 of Table I, or a portion thereof and/or has the activity of the protein indicated in the same line in column 5 of Table II or the nucleic acid molecule encoding said protein.

[0749] The nucleic acid molecule which activity is to be reduced in the process of the invention, e.g. the nucleic acid molecule of the invention, comprises a nucleotide sequence which hybridizes, preferably hybridizes under stringent conditions as defined herein, to one of the nucleotide sequences as depicted in column 5 or 7 of Table I, or a portion thereof and encodes a protein having aforementioned activity, e.g. conferring the increased tolerance and/or resistance to environmental stress and increased biomass production as compared to a corresponding non-transformed wild type plant upon the reduction of deletion of its activity, and e.g. of the activity of the protein.

[0750] Moreover, the nucleic acid molecule which activity is reduced in the process of the invention, in particular the nucleic acid molecule of the invention, can comprise only a portion of the coding region of one of the sequences depicted in column 5 or 7 of Table I, for example a fragment which can be used as a probe or primer or a fragment encoding a biologically active portion of the nucleic acid molecule or polypeptide to be reduced in the process of the present invention or a fragment encoding a non active part of the nucleic acid molecule or the polypeptide which activity is reduced in the process of the invention but conferring an increased tolerance and/or resistance to environmental stress and increased biomass production as compared to a corresponding non-transformed wild type plant if its expression or activity is reduced or deleted.

[0751] The nucleotide sequences determined from the cloning of the gene encoding the molecule which activity is reduced in the process of the invention allows the generation of probes and primers designed for the use in identifying and/or cloning its homologues in other cell types and organisms. The probe/primer typically comprises substantially purified oligonucleotide. The oligonucleotide typically comprises a region of nucleotide sequence that hybridizes under stringent conditions to at least about 12, 15 preferably about 20 or 25, more preferably about 40, 50 or 75 consecutive nucleotides of a sense strand of one of the sequences set forth described for the use in the process of the invention, e.g., comprising the molecule as depicted in column 5 or 7 of Table I, an anti-sense sequence of one of said sequence or naturally occurring mutants thereof. Primers based on a nucleotide of invention can be used in PCR reactions to clone homologues of the nucleic acid molecule which activity is to be reduced according to the process of the invention, e.g. as primer pairs described in the examples of the present invention, for example primers as depicted in column 7 of Table III, which do not start at their 5 prime end with the nucleotides ATA. Said nucleic acid molecules, which are homologues of the nucleic acid molecules which activity is to be reduced in the process of the invention or the nucleic acid molecules of the invention themselves can be used to reduce, decrease or delete the activity to be reduced according to the process of the invention.

[0752] Primer sets are interchangable. The person skilled in the art knows to combine said primers to result in the desired product, e.g. in a full-length clone or a partial sequence. Probes based on the sequences of the nucleic acid molecule used in the process of the invention can be used to detect transcripts or genomic sequences encoding the same or homologous proteins. The probe can further comprise a label group attached thereto, e.g. the label group can be a radioisotope, a fluorescent compound, an enzyme, or an enzyme co-factor. Such probes can be used as a part of a genomic marker test kit for identifying cells which contain, or express or do not contain or express a nucleic acid molecule which activity is reduced in the process of the invention, such as by measuring a level of an encoding nucleic acid molecule in a sample of cells, e.g., detecting mRNA levels or determining, whether a genomic gene comprising the sequence of the polynucleotide has been mutated or deleted.

[0753] In one embodiment, the nucleic acid molecule used in the process of the invention, preferably the polynucleotide of the invention, encodes a polypeptide or portion thereof which includes an amino acid sequence which is sufficiently homologous to the amino acid sequence as depicted in column 5 or 7 of Table II or which is sufficiently homologous to a polypeptide comprising a consensus sequence or a polypeptide motif as depicted in column 7 of Table IV.

[0754] As used herein, the language “sufficiently homologous” refers to polypeptides or portions thereof which have an amino acid sequence which includes a minimum number of identical or equivalent amino acid residues (e.g., an amino acid residue which has a similar side chain as the amino acid residue to which it is compared) compared to an amino acid sequence of an polypeptide which activity is reduced in the process of the present invention, in particular, the polypeptide is sufficiently homologous to a polypeptide comprising a polypeptide, a consensus sequence or a polypeptide motif as depicted in column 5 or 7 of Table II or IV or e.g. to a functional equivalent thereof.

[0755] Portions of the aforementioned amino acid sequence are at least 3, 5, 10, 20, 30, 40, 50 or more amino acid in length.

[0756] In one embodiment, the nucleic acid molecule used in the process of the present invention comprises a nucleic acid molecule that encodes at least a portion of the polypeptide which activity is reduced in the process of the present invention, e.g. of a polypeptide as depicted in column 5 or 7 of Table II A or B, or a homologue thereof.

[0757] In a further embodiment, the polypeptide which activity is reduced in the process of the invention, in particular the polypeptide of the invention, is at least about 30%, 35%, 40%, 45% or 50%, preferably at least about 55%, 60%, 65% or 70% and more preferably at least about 75%, 80%, 85%, 90%, 91%, 92%, 93% or 94% and most preferably at least about 95%, 97%, 98%, 99% or more homologous to an entire amino acid sequence of a polypeptide as depicted in column 5 or 7 of Table II or to a polypeptide comprising a consensus sequence or a polypeptide motif as depicted in column 7 of Table IV and having above-mentioned activity, e.g. conferring preferably the increased tolerance and/or resistance to environmental stress and increased biomass production as compared to a corresponding non-transformed wild type plantafter its activity has been reduced, repressed or deleted.

[0758] Portions of the protein are preferably in such a manner biologically active, that they are increasing the tolerance and/or resistance to environmental stress and the biomass production as compared to a corresponding non-transformed wild type plant by being in their activity reduced, repressed, decreased or deleted.

[0759] As mentioned herein, the term “biologically active portion” is intended to include a portion, e.g., a domain/motif or a epitope, that shows by introducing said portion or an encoding polynucleotide into an organism, or a part thereof, particulary into a cell, the same activity as its homologue as depicted in column 5 or 7 of Table II or IV.

[0760] In one embodiment, the portion of a polypeptide has the activity of a polypeptide as its homologue as depicted in column 5 or 7 of Table II if it is able to complementate a knock out mutant as described herein.

[0761] The invention further relates to nucleic acid molecules which as a result of degeneracy of the genetic code can be derived from a polypeptide as depicted in column 5 or 7 of Table II or from a polypeptide comprising a consensus sequence or a polypeptide motif as depicted in column 7 of Table IV and thus encodes a polypeptide to be reduced in the process of the present invention, in particular a polypeptide leading by reducing, repressing, decreasing or deleting its activity to an increase in the tolerance and/or resistance to environmental stress and in the biomass production as compared to a corresponding non-transformed wild type plant.

[0762] Advantageously, the nucleic acid molecule which activity is reduced in the process of the invention comprises or has a nucleotide sequence encoding a protein comprising or having an amino acid molecule, a consensus sequence or a polypeptide motif as depicted in column 5 or 7 of Table II or IV, and differs from the amino acid molecule's sequences as depicted in column 5 or 7 of Table II A, preferably in at least one or more amino acid.

[0763] Said above nucleic acid molecules, e.g. the nucleic acid molecules which as a result of the degeneracy of the genetic code can be derived from said polypeptide sequences, can be used for the production of a nucleic acid molecule, e.g. an antisense molecule, a tRNAs, a snRNAs, a dsRNAs, a siRNAs, a miRNAs, a ta-siRNA, cosuppression molecules, a ribozymes molecule, or a viral nucleic acid molecule, or another inhibitory or activity reducing molecule as described herein for the use in the process of the invention, e.g. for the repression, decrease or deletion of the activity of the polypeptide or the nucleic acid molecule for use in the process of the invention according to the disclosure herein.

[0764] In addition, it will be appreciated by those skilled in the art that DNA sequence polymorphisms that lead to changes in the amino acid sequences may exist within a population. Such genetic polymorphism in the gene, e.g. encoding the polypeptide of the invention or comprising the nucleic acid molecule of the invention may exist among individuals within a population due to natural variation.

[0765] As used herein, the terms “gene” and “recombinant gene” refer to nucleic acid molecules comprising an open reading frame encoding a polypeptide comprising the polypeptide which activity is reduced in the process or the invention or a to a nucleic acid molecule encoding a polypeptide molecule which activity is reduced in the process of the present invention. For example, the gene comprises a open reading frame encoding a polypeptide comprising the polypeptide, the consensus sequence or the polypeptide motif as depicted in column 5 or 7 of Table II or IV, such as the polypeptide of the invention, or encoding a nucleic acid molecule comprising a polynucleotide as depicted in column 5 or 7 of Table I, such as the nucleic acid molecule of the invention and being preferably derived from a crop plant.

[0766] The gene can also be a natural variation of said gene.

[0767] Such natural variations can typically result in 1-5% variance in the nucleotide sequence of the gene used in the inventive process.

[0768] Nucleic acid molecules corresponding to natural variant homologues of the nucleic acid molecule comprising a polynucleotide as depicted in column 5 or 7 of Table I, such as the nucleic acid molecule of the invention, and which can also be a cDNA, can be isolated based on their homology to the nucleic acid molecules disclosed herein using the nucleic acid molecule as depicted in column 5 or 7 of Table I, e.g. the nucleic acid molecule of the invention, or a fragment thereof, as a hybridization probe according to standard hybridization techniques under stringent hybridization conditions.

[0769] Accordingly, in another embodiment, the nucleic acid molecule which activity is reduced in the process of the invention, e.g. the nucleic acid molecule of the invention is at least 15, 20, 25 or 30 nucleotides in length. Preferably, it hybridizes under stringent conditions to a nucleic acid molecule comprising a nucleotide sequence of the nucleic acid molecule of the present invention, e.g. comprising the sequence as depicted in column 5 or 7 of Table I. The nucleic acid molecule is preferably at least 20, 30, 50, 100, 250 or more nucleotides in length.

[0770] The term “hybridizes under stringent conditions” is defined above. In one embodiment, the term “hybridizes under stringent conditions” is intended to describe conditions for hybridization and washing under which nucleotide sequences of at least 30%, 40%, 50% or 65% identical to each other typically remain hybridized to each other. Preferably, the conditions are such that sequences of at least about 70%, more preferably at least about 75% or 80%, and even more preferably of at least about 85%, 90% or 95% or more identical to each other typically remain hybridized to each other.

[0771] In one emboliment the nucleic acid molecule of the invention hybridizes under stringent conditions to a sequence of column 7 of Table 1B and corresponds to a naturally-occurring nucleic acid molecule. As used herein, a “naturally-occurring” nucleic acid molecule refers to a RNA or DNA molecule having a nucleotide sequence that occurs in nature (e.g., encodes a natural protein). Preferably, the nucleic acid molecule encodes a natural protein conferring an increase of the tolerance and/or resistance to environmental stress and of the biomass production as compared to a corresponding non-transformed wild type plant after reducing, decreasing or deleting the expression or activity thereof.

[0772] In addition to naturally-occurring variants of the nucleic acid or protein sequence that may exist in the population, the skilled artisan will further appreciate that changes can be introduced by mutation into a nucleotide sequence of the nucleic acid molecule encoding the polypeptide, thereby leading to changes in the amino acid sequence of the encoded polypeptide and thereby altering the functional ability of the polypeptide, meaning preferably reducing, decreasing or deleting said activity. For example, nucleotide substitutions leading to amino acid substitutions at “essential” amino acid residues can be made in a sequence of the nucleic acid molecule to be reduced in the process of the invention, e.g. comprising the corresponding nucleic acid molecule as depicted in column 5 or 7 of Table I. An “essential” amino acid residue is a residue that if altered from the wild-type sequence of one of the polypeptide lead to an altered activity of said polypeptide, whereas a “non-essential” amino acid residue is not required for the activity of the protein for example for the activity as an enzyme. The alteration of “essential” residues often lead to a reduced decreased or deleted activity of the polypeptides. Preferably amino acid of the polypeptide are changed in such a manner that the activity is reduced, decreased or deleted that means preferably essential amino acid residues and/or more non-essential residues are changed and thereby the activity is reduced, which leads as mentioned above to an increase in tolerance and/or resistance to environmental stress and in biomass production as compared to a corresponding non-transformed wild type plant in a plant after decreasing the expression or activity of the polypeptide. Other amino acid residues, however, (e.g., those that are not conserved or only semi-conserved in the domain having said activity) may not be essential for activity and thus are likely to be amenable to alteration without altering said activity are less preferred.

[0773] A further embodiment of the invention relates to the specific search or selection of changes in a nucleic acid sequence which confer a reduced, repressed or deleted activity in a population, e.g. in a natural or artificial created population. It is often complex and expensive to search for an increase in tolerance and/or resistance to environmental stress and in biomass production as compared to a corresponding nontransformed wild type plant in a population, e.g. due to complex analytical procedures. It can therefore be advantageous to search for changes in a nucleic acid sequence which confer a reduced, repressed or deleted activity of the expression product in said population, thus, identifying candidates which bring about the desired increase in the tolerance and/or resistance to environmental stress and in biomass production as compared to a corresponding non-transformed wild type plantcontent. A typical example of a natural gene, the downregulation of which leads to the desired trait is the mlo locus (Pifanelli et al., Nature 2004 Aug. 19; 430(7002): 887-91. Barley plants carrying loss-of-function alleles (mlo) of the Mlo locus are resistant against all known isolates of the widespread powdery mildew fungus. The sole mlo resistance allele recovered so far from a natural habitat, mlo-11, was originally retrieved from Ethiopian landraces and nowadays controls mildew resistance in the majority of cultivated European spring barley elite varieties. Thus, one can search for natural alleles, which bring about the desired reduction, repression, deletion or decrease in the function of a nucleic acid molecule and can introduce such alleles into agronomical important crop varieties through crossing and marker assisted selection or related methods.

[0774] Further, a person skilled in the art knows that the codon usage between organisms can differ. Therefore, he will adapt the codon usage in the nucleic acid molecule of the present invention to the usage of the organism in which the polynucleotide or polypeptide is expressed, so that the expression of the nucleic acid molecule or the encoded protein is more likely reduced.

[0775] Accordingly, the invention relates to a homologues nucleic acid molecule of a nucleic acid molecules encoding a polypeptide having abovementioned activity in a plant or parts thereof after being reduced, decreases, repressed or deleted, that contain changes in its amino acid residues that are essential for its activity and thus reduce, decrease, repress or delete its activity.

[0776] Such polypeptides differ in the amino acid sequence from a sequence as depicted in column 5 or 7 of Table II or comprising a consensus sequence or a polypeptide motif as depicted in column 7 of Table IV yet and confer an increase the tolerance and/or resistance to environmental stress and the biomass production as compared to a corresponding non-transformed wild type plant. The nucleic acid molecule can comprise a nucleotide sequence encoding a polypeptide, wherein the polypeptide comprises an amino acid sequence at least about 50% identical to an amino acid sequence as depicted in column 5 or 7 of Table II or comprising a consensus sequence or a polypeptide motif as depicted in column 7 of Table IV and is capable of participation in the increase of the tolerance and/or resistance to environmental stress and of the biomass production as compared to a corresponding non-transformed wild type plant after decreasing its expression or its biological function.

[0777] Preferably, the protein encoded by the nucleic acid molecule is at least about 60%, 70% or 80% identical to the sequence in column 5 or 7 of Table II or to a sequence comprising a consensus sequence or a polypeptide motif as depicted in column 7 of Table IV, more preferably at least about 85% identical to one of the sequences in column 5 or 7 of Table II or to a sequence comprising a consensus sequence or a polypeptide motif as depicted in column 7 of Table IV, even more preferably at least about 90%, 91%, 92%, 93%, 94%, 95% homologous to the sequence in column 5 or 7 of Table II or to a sequence comprising a consensus sequence or a polypeptide motif as depicted in column 7 of Table IV, and most preferably at least about 96%, 97%, 98%, or 99% identical to the sequence in column 5 or 7 of Table II or to a sequence comprising a consensus sequence or a polypeptide motif as depicted in column 7 of Table IV.

[0778] To determine the percentage homology (=identity) of two amino acid sequences (for example of column 7 of Table II) or of two nucleic acid molecules (for example of column 5 or Table I), the sequences are written one underneath the other for an optimal comparison. Gaps may be inserted into the sequence of a protein or of a nucleic acid molecule in order to generate an optimal alignment with the other protein or the other nucleic acid. The amino acid residue or nucleotide at the corresponding amino acid position or nucleotide position is then compared between both polymers. If a position in one sequence is occupied by the same amino acid residue or the same nucleotide as in the corresponding position of the other sequence, the molecules are identical at this position. Amino acid or nucleotide “identity” as used in the present context corresponds to amino acid or nucleic acid “homology”. Generally the percentage homology between the two sequences is a function of the number of identical positions shared by the sequences (i.e. % homology=number of identical positions/total number of positions x 100). The terms “homology” and “identity” are thus to be considered as synonyms for this description.

[0779] For the determination of the percentage homology (=identity) of two or more amino acid or of two or more nucleotide sequences several computer software programs have been developed. The homology of two or more sequences can be calculated with for example the software fasta, which presently has been used in the version fasta 3 (W. R. Pearson and D. J. Lipman (1988), Improved Tools for Biological Sequence Comparison. PNAS 85:2444-2448; W. R. Pearson (1990) Rapid and Sensitive Sequence Comparison with FASTP and FASTA, Methods in Enzymology 183:63-98; W. R. Pearson and D. J. Lipman (1988) Improved Tools for Biological Sequence Comparison. PNAS 85:2444-2448; W. R. Pearson (1990); Rapid and Sensitive Sequence Comparison with FASTP and FASTAMethods in Enzymology 183:63-98). Another useful program for the calculation of homologies of different sequences is the standard blast program, which is included in the Biomax pedant software (Biomax, Munich, Federal Republic of Germany). This leads unfortunately sometimes to suboptimal results since blast does not always include complete sequences of the subject and the query. Nevertheless as this program is very efficient it can be used for the comparison of a huge number of sequences. The following settings are typically used for such a comparisons of sequences: -p Program Name [String]; -d Database [String]; default=nr; -i Query File [File In]; default=stdin; -e Expectation value (E) [Real]; default=10.0; -m alignment view options: 0=pairwise; 1=query-anchored showing identities; 2=query-anchored no identities; 3=flat query-anchored, show identities; 4=flat query-anchored, no identities; 5=query-anchored no identities and blunt ends; 6=flat query-anchored, no identities and blunt ends; 7=XML Blast output; 8=tabular; 9 tabular with comment lines [Integer]; default=0;-o BLAST report Output File [File Out] Optional; default=stdout; -F Filter query sequence (DUST with blastn, SEG with others) [String]; default=T; -G Cost to open a gap (zero invokes default behavior) [Integer]; default=0;-E Cost to extend a gap (zero invokes default behavior) [Integer]; default=0;-X X dropoff value for gapped alignment (in bits) (zero invokes default behavior); blastn 30, megablast 20, tblastx 0, all others 15 [Integer]; default=0;-I Show GI's in deflines [T/F]; default=F; -q Penalty for a nucleotide mismatch (blastn only) [Integer]; default=-3;-r Reward for a nucleotide match (blastn only) [Integer]; default=1;-v Number of database sequences to show one-line descriptions for (V) [Integer]; default=500;-b Number of database sequence to show alignments for (B) [Integer]; default=250;-f Threshold for extending hits, default if zero; blastp 11, blastn 0, blastx 12, tblastn 13; tblastx 13, megablast 0 [Integer]; default=0;-g Perfom gapped alignment (not available with tblastx) [T/F]; default=T; -Q Query Genetic code to use [Integer]; default=1;-D DB Genetic code (for tblast[nx] only) [Integer]; default=1;-a Number of processors to use [Integer]; default=1;-O SegAlign file [File Out] Optional; -J Believe the query defline [T/F]; default=F; -M Matrix [String]; default=BLOSUM62;-W Word size, default if zero (blastn 11, megablast 28, all others 3) [Integer]; default=0;-z Effective length of the database (use zero for the real size) [Real]; default=0;-K Number of best hits from a region to keep (off by default, if used a value of 100 is recommended) [Integer]; default=0;-P 0 for multiple hit, 1 for single hit [Integer]; default=0;-Y Effective length of the search space (use zero for the real size) [Real]; default=0;-S Query strands to search against database (for blast[nx], and tblastx); 3 is both, 1 is top, 2 is bottom [Integer]; default=3;-T Produce HTML output [T/F]; default=F; -I Restrict search of database to list of GI's [String] Optional; -U Use lower case filtering of FASTA sequence [T/F] Optional; default=F; -y X dropoff value for ungapped extensions in bits (0.0 invokes default behavior); blastn 20, megablast 10, all others 7 [Real]; default=0.0;-Z X dropoff value for final gapped alignment in bits (0.0 invokes default behavior); blastn/megablast 50, tblastx 0, all others 25 [Integer]; default=0;-R PSI-TBLASTN checkpoint file [File In] Optional; -n MegaBlast search [T/F]; default=F; -L Location on query sequence [String] Optional; -A Multiple Hits window size, default if zero (blastn/megablast 0, all others 40 [Integer]; default=0;-w Frame shift penatty (OOF algorithm for blastx) [Integer]; default=0;-t Length of the largest intron allowed in tblastn for linking HSPs (0 disables linking) [Integer]; default=0.

[0780] Results of high quality are reached by using the algorithm of Needleman and Wunsch or Smith and Waterman. Therefore programs based on said algorithms are preferred. Advantageously the comparisons of sequences can be done with the program PileUp (J. Mol. Evolution., 25, 351 (1987), Higgins et al., CABIOS 5, 151 (1989)) or preferably with the programs “Gap” and “Needle”, which are both based on the algorithms of Needleman and Wunsch (J. Mol. Biol. 48; 443 (1970)), and “BestFit”, which is based on the algorithm of Smith and Waterman (Adv. Appl. Math. 2; 482 (1981)). “Gap” and “BestFit” are part of the GCG software-package (Genetics Computer Group, 575 Science Drive, Madison, Wis., USA 53711 (1991); Altschul et al., (Nucleic Acids Res. 25, 3389 (1997)), “Needle” is part of the The European Molecular Biology Open Software Suite (EMBOSS) (Trends in Genetics 16 (6), 276 (2000)). Therefore preferably the calculations to determine the percentages of sequence homology are done with the programs “Gap” or “Needle” over the whole range of the sequences. The following standard adjustments for the comparison of nucleic acid sequences were used for “Needle”: matrix: EDNAFULL, Gap penalty: 10.0, Extend penalty: 0.5. The following standard adjustments for the comparison of nucleic acid sequences were used for “Gap”: gap weight: 50, length weight: 3, average match: 10.000, average mismatch: 0.000.

[0781] For example a sequence which has a 80% homology with sequence depicted in SEQ ID NO.: 1025 at the nucleic acid level is understood as meaning a sequence which, upon comparison to the sequence SEQ ID NO: 1025 by the above Gap program algorithm with the above parameter set, has 80% homology.

[0782] Homology between two polypeptides is understood as meaning the identity of the amino acid sequence over in each case the entire sequence length which is calculated by comparison with the aid of the program algorithm “Needle” using Matrix: EBLOSUM62, Gap penalty: 8.0, Extend penalty: 2.0.

[0783] For example a sequence which has a 80% homology with sequence SEQ ID NO: 1026 at the protein level is understood as meaning a sequence which, upon comparison to the sequence SEQ ID NO: 1026 by the above program “Needle” with the above parameter set, has 80% identity.

[0784] Functional equivalents derived from one of the polypeptides as depicted column 5 or 7 of Table II or comprising the consensus sequence or the polypeptide motif as depicted in column 7 of Table IV according to the invention by substitution, insertion or deletion have at least 30%, 35%, 40%, 45% or 50%, preferably at least 55%, 60%, 65% or 70% by preference at least 80%, especially preferably at least 85% or 90%, 91%, 92%, 93% or 94%, very especially preferably at least 95%, 97%, 98% or 99% homology with one of the polypeptides as shown in column 5 or 7 of Table II or with one of the polypeptides comprising a consensus sequence or a polypeptide motif as depicted in column 7 of Table IV according to the invention and are distinguished by essentially the same properties as the polypeptide as depicted in column 5 or 7 of Table II preferably of the polypeptides of A. thaliana.

[0785] Functional equivalents derived from the nucleic acid sequence as depicted in column 5 or 7 of Table I according to the invention by substitution, insertion or deletion have at least 30%, 35%, 40%, 45% or 50%, preferably at least 55%, 60%, 65% or 70% by preference at least 80%, especially preferably at least 85% or 90%, 91%, 92%, 93% or 94%, very especially preferably at least 95%, 97%, 98% or 99% homology with one of the nucleic acids as depicted in column 5 or 7 of Table I according to the invention and encode polypeptides having essentially the same properties as the polypeptide as depicted in column 5 of Table II.

[0786] “Essentially the same properties” of a functional equivalent is above all understood as meaning that the functional equivalen has above mentioned activity, e.g conferring an increasing in the tolerance and/or resistance to environmental stress and in the biomass production as compared to a corresponding non-transformed wild type plant while decreasing the amount of protein, activity or function of said functional equivalent in an organism, e.g. a plant or in a plant tissue, plant cells or a part of the same.

[0787] A nucleic acid molecule encoding an homologous to a protein sequence shown herein can be created by introducing one or more nucleotide substitutions, additions or deletions into a nucleotide sequence of a nucleic acid molecule comprising the nucleic acid molecule as depicted in column 5 or 7 of Table I such that one or more amino acid substitutions, additions or deletions are introduced into the encoded protein. Mutations can be introduced into the sequences of, e.g. the sequences as depicted in column 5 or 7 of Table I, by standard techniques, such as site-directed mutagenesis and PCR-mediated mutagenesis.

[0788] Preferably, non-conservative amino acid substitutions are made at one or more predicted non-essential or preferably essential amino acid residues and thereby reducing, decreasing or deleting the activity of the respective protein. A “conservative amino acid substitution” is one in which the amino acid residue is replaced with an amino acid residue having a similar side chain. Families of amino acid residues having similar side chains have been defined in the art. These families include amino acids with basic side chains (e.g., lysine, arginine, histidine), acidic side chains (e.g., aspartic acid, glutamic acid), uncharged polar side chains (e.g., glycine, asparagine, glutamine, serine, threonine, tyrosine, cysteine), nonpolar side chains (e.g., alanine, valine, leucine, isoleucine, proline, phenylalanine, methioninemethionine, tryptophan), beta-branched side chains (e.g., threonine, valine, isoleucine) and aromatic side chains (e.g., tyrosine, phenylalanine, tryptophan, histidine).

[0789] Thus, a predicted essential amino acid residue in a polypeptide used in the process or in the polypeptide of the invention, is preferably replaced with another amino acid residue from another family. Alternatively, in another embodiment, mutations can be introduced randomly along all or part of a coding sequence of a nucleic acid molecule coding for a polypeptide used in the process of the invention or a polynucleotide of the invention such as by saturation mutagenesis, and the resultant mutants can be screened for activity described herein to identify mutants that lost or have a decreased activity and conferring an increased tolerance and/or resistance to environmental stress and increased biomass production as compared to a corresponding non-transformed wild type plant.

[0790] Following mutagenesis of one of the sequences of column 5 or 7 of Table I, the encoded protein can be expressed recombinantly and the activity of the protein can be determined using, for example, assays described herein.

[0791] Essentially homologous polynucleotides of the nucleic acid molecule shown herein for the process according to the invention and being indicated in column 5 of Table I were found by BlastP database search with the corresponding polypeptide sequences. The SEQ ID No: of the found homologous sequences of a nucleic acid molecule indicated in column 5 of Table I are shown in column 7 of Table I in the respective same line. The SEQ ID No: of the found homologous sequences of a protein molecule indicated in column 5 of Table II are depicted in column 7 of Table II in the respective same line.

[0792] The protein sequence of a nucleic acid molecule depicted in column 5 and Table I were used to search protein databases using the tool BlastP. Homologous protein sequences were manually selected according to their similarity to the query protein sequence. The nucleotide sequence corresponding to the selected protein sequence is specified in the header section of the protein database entry in most cases and was used if present. If a protein database entry did not provide a direct cross-reference to the corresponding nucleotide database entry, the sequence search program TBlastN was used to identify nucleotide database entries from the same organism encoding exactly the same protein (100% identity). The expectation value was set to 0.001 in TBlastN and the blosum62 matrix was used; all other parameters were used in its default settings.

[0793] Further, the protein patterns defined for the protein sequences depicted in column 5 and 7 Table II were used to search protein databases. Protein sequences exhibiting all protein patterns depicted in column 7 of Table IV were aligned with the protein sequence depicted in column 5 and 7 Table II of the respective same line and selected as homologous proteins if significant similarity was observed.

[0794] Homologues of the nucleic acid sequences used, having or being derived from a sequence as depicted in column 5 or 7 of Table I or of the nucleic acid sequences derived from the sequences as depicted in column 5 or 7 of Table II or from the sequence comprising the consensus sequences or the polypeptide motifs as depicted in column 7 of Table IV comprise also allelic variants with at least approximately 30%, 35%, 40% or 45% homology, by preference at least approximately 50%, 60% or 70%, more preferably at least approximately 90%, 91%, 92%, 93%, 94% or 95% and even more preferably at least approximately 96%, 97%, 98%, 99% or more homology with one of the nucleotide sequences shown or the abovementioned derived nucleic acid sequences or their homologues, derivatives or analogues or parts of these. Allelic variants encompass in particular functional variants which can be obtained by deletion, insertion or substitution of nucleotides from the sequences shown or used in the process of the invention, preferably as depicted in column 5 or 7 of Table I, or from the derived nucleic acid sequences.

[0795] In one embodiment, however, the enzyme activity or the activity of the resulting proteins synthesized is advantageously lost or decreased, e.g. by mutation of sequence as described herein or by applying a method to reduce or inhibit or loose the biological activity as described herein.

[0796] In one embodiment of the present invention, the nucleic acid molecule used in the process of the invention or the nucleic acid molecule of the invention comprises a sequence as depicted in column 5 or 7 of Table I or its complementary sequence. It can be preferred that a homologue of a nucleic acid molecule as depicted in column 5 or 7 of Table I comprises as little as possible other nucleotides compared to the sequence as depicted in column 5 or 7 of Table I or its complementary sequence. In one embodiment, the nucleic acid molecule comprises less than 500, 400, 300, 200, 100, 90, 80, 70, 60, 50 or 40 further or other nucleotides. In a further embodiment, the nucleic acid molecule comprises less than 30, 20 or 10 further or other nucleotides. In one embodiment, the nucleic acid molecule use in the process of the invention is identical to the sequences as depicted in column 5 or 7 of Table I or its complementary sequence.

[0797] Also preferred is that the nucleic acid molecule used in the process of the invention encodes a polypeptide comprising the sequence, a consensus sequence or a polypeptide motif as depicted in column 5 or 7 of Table II or IV. In one embodiment, the nucleic acid molecule encodes less than 150, 130, 100, 80, 60, 50, 40 or 30 further or other amino acids. In a further embodiment, the encoded polypeptide comprises less than 20, 15, 10, 9, 8, 7, 6 or 5 further or other amino acids. In one embodiment used in the inventive process, the encoded polypeptide is identical to the sequences as depicted in column 5 or 7 of Table II.

[0798] In one embodiment, the nucleic acid molecule used in the process of invention encoding a polypeptide comprising a sequence, a consensus sequence or a polypeptide motif as depicted in column 5 or 7 of Table II or IV comprises less than 100 further or other nucleotides different from the sequence shown in column 5 or 7 of Table I. In a further embodiment, the nucleic acid molecule comprises less than 30 further or other nucleotides different from the sequence as depicted in column 5 or 7 of Table I. In one embodiment, the nucleic acid molecule is identical to a coding sequence of the sequences as depicted in column 5 or 7 of Table I

[0799] Homologues of sequences depicted in column 5 or 7 of Table I or of the derived sequences from the sequences as depicted in column 5 or 7 of Table II or from sequences comprising the consensus sequences or the polypeptide motifs as depicted in column 7 of Table IV also mean truncated sequences, cDNA, single-stranded DNA or RNA of the coding and noncoding DNA sequence. Homologues of the sequences as depicted in the column 5 or 7 of Table I or the derived sequences of the sequences as depicted in column 5 or 7 of Table II or from sequences comprising the consensus sequences or the polypeptide motifs as depicted in column 7 of Table IV are also understood as meaning derivatives which comprise noncoding regions such as, for example, UTRs, terminators, enhancers or promoter variants.

[0800] The regulatory sequences upstream or downstream of the nucleotide sequences stated can be modified by one or more nucleotide substitution(s), insertion(s) and/or deletion(s) with, however, preferably interfering with the functionality or activity either of the promoters, the open reading frame (=ORF) or with the 3′-regulatory region such as terminators or other 3′regulatory regions, which are far away from the ORF. It is furthermore possible that the activity of the promoters is decreased by modification of their sequence or their regulation, or that they are replaced completely by less active promoters and thereby the activity of the expressed nucleic acid sequence is reduced or deleted, even promoters from heterologous organisms can be used. Appropriate promoters are known to the person skilled in the art and are mentioned herein below. Modifying the regulatory sequences might be specifically advantageous in those cases were a complete elimination of the expression of the nucleic acid of the invention has negative side effects, such as reduced growth or yield. The person skilled in the art is able to modify the regulatory sequences of the nucleic acid of the invention in such a way that the reduction is sufficient to yield the increased tolerance and/or resistance to environmental stress and increased biomass production as compared to a corresponding non-transformed wild type plant without having unwanted side effects. In this context it might be further advantageously to modify the regulatory sequences in such a way that the reduction in expression occurs in a spatial or temporal manner. For example, it might be useful to inhibit, downregulate or repress the nucleic acids or the polypeptide of the invention only in the mature state of the plant, to achieve the desired increased tolerance and/or resistance to environmental stress and increased biomass production as compared to a corresponding non-transformed wild type plant without interfering with the growth or maturation of the organism. Further methods exists to modulate the promoters of the genes of the invention, e.g. by modifying the activity of transacting factors, meaning natural or artificial transcription factors, which can bind to the promoter and influence its activity. Furthermore it is possible to influence promoters of interest by modifying upstream signaling components like receptors or kinases, which are involved in the regulation of the promoter of interest.

[0801] In a further embodiment, the process according to the present invention comprises the following steps:
[0802] a) selecting an organism or a part thereof expressing the polypeptide or nucleic acid molecule which activity is reduced in the process of the invention, e.g. a polypeptide comprising a polypeptide, a consensus sequence or a polypeptide motif as depicted in column 5 or 7 of Table II or IV or a nucleic acid molecule comprising a nucleic acid molecule as depicted in column 5 or 7 of Table I;
[0803] b) mutagenizing the selected organism or the part thereof;
[0804] c) comparing the activity or the expression level of said polypeptide or nucleic acid molecule in the mutagenized organism or the part thereof with the activity or the expression of said polypeptide in the selected organisms or the part thereof;
[0805] d) selecting the mutagenized organisms or parts thereof, which comprise a decreased activity or expression level of said polypeptide compared to the selected organism (a) or the part thereof;
[0806] e) optionally, growing and cultivating the organisms or the parts thereof; and
[0807] f) testing, whether the organism or the part thereof has anincreased tolerance and/or resistance to environmental stress and increased biomass production as compared to a corresponding non-transformed wild type plant, such as a not mutagenized source or origin strain.

[0808] Advantageously the selected organisms were mutagenized according to the invention. According to the invention mutagenesis is any change of the genetic information in the genome of an organism, that means any structural or compositional change in the nucleic acid preferably DNA of an organism that is not caused by normal segregation or genetic recombiantion processes. Such mutations may occur spontaneously, or may be induced by mutagens as described below. Such change can be induced either randomly or selectively. In both cases the genetic information of the organism is modified. In general this leads to the situation that the activity of the gene product of the relevant genes inside the cells or inside the organism is reduced or repressed.

[0809] In case of the specific or so-called site directed mutagenesis a distinct gene is mutated and thereby its activity and/or the activity or the encoded gene product is repressed, reduced, decreased or deleted. In the event of a random mutagenesis one or more genes are mutated by chance and their activities and/or the activities of their gene products are repressed, reduced, decreased or deleted, preferably decreased or deleted. Nevertheless mutations in the gene of interest can be selected for by various methods know to the person skilled in the art.

[0810] For the purpose of a mutagenesis of a huge population of organisms, such population can be transformed with a DNA population or a DNA bank or constructs or elements, which are useful for the inhibition of as much as possible genes of an organism, preferably all genes. With this method it is possible to statistically mutagenize nearly all genes of an organism by the integration of an advantageously identified DNA-fragment. Afterwards the skilled worker can easely identify the knocked out event. For the mutagenesis of plants EMS, T-DNA and/or transposon mutagenesis is preferred.

[0811] In the event of a random mutagenesis a huge number of organisms are treated with a mutagenic agent. The amount of said agent and the intensity of the treatment is chosen in such a manner that statistically nearly every gene is mutated. The process for the random mutagensis as well as the respective agens is well known by the skilled person. Such methods are disclosed for example by A. M. van Harten [(1998), “Mutation breeding: theory and practical applications”, Cambridge University Press, Cambridge, UK], E Friedberg, G Walker, W Siede [(1995), “DNA Repair and Mutagenesis”, Blackwell Publishing], or K. Sankaranarayanan, J. M. Gentile, L. R. Ferguson [(2000) “Protocols in Mutagenesis”, Elsevier Health Sciences]. As the skilled worker knows the spontaneous mutation rate in the cells of an organism is very low and that a large number of chemical, physical or biological agents are available for the mutagenesis of organisms. These agents are named as mutagens or mutagenic agents. As mentioned before three different kinds of mutagens chemical, physical or biological agents are available.

[0812] There are different classes of chemical mutagens, which can be separated by their mode of action. For example base analogues such as 5-bromouracil, 2-amino purin. Other chemical mutagens are interacting with the DNA such as sulphuric acid, nitrous acid, hydroxylamine; or other alkylating agents such as monofunctional agents like ethyl methanesulfonate (=EMS), dimethylsulfate, methyl methanesulfonate, bifunctional like dichloroethyl sulphide, Mitomycin, Nitrosoguanidine—dialkylnitrosamine, N-Nitrosoguanidin derivatives, N-alkyl-N-nitro-N-nitroso-guanidine, intercalating dyes like Acridine, ethidium bromide.

[0813] Physical mutagens are for example ionizing irradiation (X-ray), UV irradiction. Different forms of irradiation are available and they are strong mutagens. Two main classes of irradiation can be distinguished: a) non-ionizing irradiation such as UV light or ionizing irradiation such as X-ray. Biological mutagens are for example transposable elements for example IS elements such as IS100, transposons such as Tn5, Tn10, Tn903, Tn916 or Tn1000 or phages like Mu^{amplac}, P1, T5, λplac etc. Methods for introducing this phage DNA into the appropriate microorganism are well known to the skilled worker (see Microbiology, Third Edition, Eds. Davis, B. D., Dulbecco, R., Eisen, H. N. and Ginsberg, H. S., Harper International Edition, 1980). The common procedure of a transposon mutagenesis is the insertion of a transposable element within a gene or nearby for example in the promotor or terminator region and thereby leading to a loss of the gene function. Procedures to localize the transposon within the genome of the organisms are well known by a person skilled in the art. For transposon mutagenesis in plants the maize transposon systems Activator-Dissociation (Ac/Ds) and Enhancer-Supressor mutator (En/Spm) are known to the worker skilled in the art but other transposon systems might be similar useful. The transposons can be brought into the plant genomes by different available standard techniques for plant transformations. Another type of biological mutagenesis in plants includes the T-DNA mutagenesis, meaning the random integration of T-DNA sequences into the plant genome [Feldmann, K. A. (1991) T-DNA insertion mutagenesis in Arabidopsis: Mutational spectrum. Plant J. 1, 71-82]. The event in which the gene of interest is mutated can later be searched by PCR- or other high throughput technologies [Krysan et al., (1999) T_DNA as an insertional mutagen in Arabidopsis, Plant Cell, 11, 2283-2290].

[0814] Biological methods are disclosed by Spee et al. (Nucleic Acids Research, Vol. 21, No. 3, 1993: 777-778). Spee et al. teaches a PCR method using dITP for the random mutagenesis. This method described by Spee et al. was further improved by Rellos et al. (Protein Expr. Purif., 5, 1994 : 270-277). The use of an in vitro recombination technique for molecular mutagenesis is described by Stemmer (Proc. Natl. Acad. Sci. USA, Vol. 91, 1994: 10747-10751). Moore et al. (Nature Biotechnology Vol. 14, 1996: 458-467) describe the combination of the PCR and recombination methods for increasing the enzymatic activity of an esterase toward a para-nitrobenzyl ester. Another route to the mutagenesis of enzymes is described by Greener et al. in Methods in Molecular Biology (Vol. 57, 1996: 375-385). Greener et al. use the specific Escherichia coli strain XL1-Red to generate Escherichia coli mutants, which have increased antibiotic resistance.

[0815] Preferably a chemical or biochemical procedure is used for the mutagenesis of the organisms. A preferred chemical method is the mutagenesis with N-methyl-N-nitro-nitrosoguanidine.

[0816] Other methods are for example the introduction of mutation with the aid of viruses such as bacteriophages such as P1, P22, T2, T3, T5, T7, Mu^{amplac}, Mu, Mu1, MuX, miniMu, λ, λplac or insertion elements such as IS3, IS 100, IS900 etc. Again the whole genome of the bacteria is randomly mutagenized. Mutants can be easily identifled.

[0817] Another method to disrupt the nucleic acid sequence used in the process of the invention and thereby reducing, decreasing or deleting the activity of the encoded polypeptide can be reached by homologous recombination with an little altered nucleic acid sequence of the invention described herein as usable for the process of the invention, e.g. derived from the sequence shown in column 5 or 7 of Table I. For example, the nucleic acid sequences used in the process of the invention can therefore be altered by one or more point mutations, deletions, insertions, or inversions. In another embodiment of the invention, one or more of the regulatory regions (e.g., a promoter, repressor, UTR, enhancer, or inducer) of the gene encoding the protein of the invention can be altered (e.g., by deletion, truncation, inversion, insertion, or point mutation) such that the expression of the corresponding gene is modulated that means reduced, decreased or deleted.

[0818] Accordingly, in one embodiment, the invention relates to an isolated nucleic acid molecule encoding an antisense, RNAi, snRNA, dsRNA, siRNA, miRNA, ta-siRNA, cosuppression molecule, or ribozyme molecule of the invention or the co-suppression nucleic acid molecule or the viral degradation nucleic acid molecule of the invention or encoding a DNA-, RNA- or protein-binding factor against genes, RNA's or proteins, a dominant negative mutant, or an antibody of the invention or the nucleic acid molecule for a recombination of the invention, in particular the nucleic acid molecule for a homologous recombination, comprising at least a fragment of 15, 16, 17, 18, 19, 20, 21, 25, 30, 35, 40, 50, 70, 100, 200, 300, 500, 1000, 2000 or more nucleotides of a nucleic acid molecule selected from the group consisting of:
[0819] a) a nucleic acid molecule encoding the polypeptide as depicted in column 5 or 7 of Table II, preferably of Table IIB or encompassing a consensus sequence or a polypeptide motif as depicted in column 7 Table IV;
[0820] b) a nucleic acid molecule as depicted in column 5 or 7 of Table I, preferably of Table IB;
[0821] c) a nucleic acid molecule, which, as a result of the degeneracy of the genetic code, can be derived from a polypeptide sequence as depicted in column 5 or 7 of Table II, preferably of Table IIB;
[0822] d) a nucleic acid molecule having at least 30% identity with the nucleic acid moleculesequence of a polynucleotide comprising the nucleic acid molecule as depicted in column 5 or 7 of Table I, preferably of Table IB;
[0823] e) a nucleic acid molecule encoding a polypeptide having at least 30% identity with the amino acid sequence of the polypeptide encoded by the nucleic acid molecule of (a) to (c) and having the activity represented by a protein as depicted in column 5 of Table II;
[0824] f) a nucleic acid molecule encoding a polypeptide which is isolated with the aid of monoclonal or polyclonal antibodies directed against a polypeptide encoded by one of the nucleic acid molecules of (a) to (e) and having the activity represented by the protein as depicted in column 5 7 of Table II;
[0825] g) a nucleic acid molecule encoding a polypeptide comprising the consensus sequence or polypeptide motif as depicted in column 7 of Table IV;
[0826] h) a nucleic acid molecule encoding a polypeptide having the activity represented by the protein as depicted in column 5 of Table II;
[0827] i) nucleic acid molecule which comprises a polynucleotide, which is obtained by amplifying a cDNA library or a genomic library using the primers as depicted in column 7 of Table III, which do not start at their 5 prime end with the nucleotides ATA;
[0828] j) nucleic acid molecule encoding a polypeptide, the polypeptide being derived by substituting, deleting and/or adding one or more amino acids of the amino acid sequence of the polypeptide encoded by the nucleic acid molecules (a) to (d); and
[0829] k) a nucleic acid molecule which is obtainable by screening a suitable nucleic acid library under stringent hybridization conditions with a probe comprising a complementary sequence of a nucleic acid molecule of (a) or (b) or with a fragment thereof, having at least 15 nt, preferably 20 nt, 30 nt, 50 nt, 100 nt, 200 nt or 500 nt of a nucleic acid molecule complementary to a nucleic acid molecule sequence characterized in (a) to (d) and encoding a polypeptide having the activity represented by a protein as depicted in column 5 Table II; or which comprises a sequence which is complementary thereto;

[0830] or which comprises a sequence which is complementary thereto;

[0831] whereby the antisense, RNAi, snRNA, dsRNA, siRNA, miRNA, ta-siRNA, cosuppression molecule, or ribozyme nucleic acid molecule differs at least in one, five, ten, 20, 50, 100 or more nucleotides from the sequence as depicted in column 5 or 7 of Table I A.

[0832] In a preferred embodiment, the term “the nucleic acid molecule used in the process of the invention” as used herein relates to said nucleic acid molecule which expression confers the reduction, repression or deletion of the activity selected from the group consisting of 1-phosphatidylinositol 4-kinase, amino acid permease (AAP1), At3g55990-protein, At5g40590-protein, ATP-dependent peptidase/ ATPase/ nucleo-side-triphosphatase/serine-type endopeptidase, DC1 domain-containing protein/protein-binding protein/zinc ion binding protein, DNA binding protein/transcription factor, hydro-lyase/aconitate hydratase, metalloexopeptidase (MAP1C), methyltransferase, nitrate transporter (ATNRT2.3), nitrate/chlorate transporter (NRT1.1), pectate lyase protein/powdery mildew susceptibility protein (PMR6), peptidase/ubiquitin-protein ligase/zinc ion binding protein (JR700), proton-dependent oligopeptide transport protein, transcription factor, and/or ubiquitin conjugating enzyme/ubiquitin-like activating enzyme.

[0833] In a more preferred embodiment, the term “the nucleic acid molecule used in the process of the invention” as used herein relates to the nucleic acid molecule which expression confers the reduction, repression or deletion of the activity represented by a nucleic acid molecule comprising a nucleic acid molecule as depicted in column 5 or 7 of Table I or represented by a polypeptide comprising a polypeptide, a consensus sequence or a polypeptide motif as depicted in column 5 or 7 of Table II or IV.

[0834] In an even more preferred embodiment, the term “the nuleic acid molecule used in the process of the invention” relates to the antisense, RNAi, snRNA, dsRNA, siRNA, miRNA, ta-siRNA, cosuppression molecule, or ribozyme molecule of the invention or the cosuppression nucleic acid molecule or the viral degradation nucleic acid molecule of the invention or encoding a DNA-, RNA- or protein-binding factor against genes, RNA's or proteins, a dominant negative mutant, or an antibody of the invention or the nucleic acid molecule for a recombination of the invention, in particular the nucleic acid molecule for producing a homologous recombination event.

[0835] The nucleic acid sequences used in the process are advantageously introduced in a nucleic acid construct, preferably an expression cassette, which allows the reduction, depression etc. of the nucleic acid molecules in an organism, advantageously a plant or a microorganism.

[0836] Accordingly, the invention also relates to a nucleic acid construct, preferably to an expression construct, comprising the nucleic acid molecule used in the process of the present invention or a fragment thereof functionally linked to one or more regulatory elements or signals. Furthermore the invention also relates to a nucleic acid constructs for the production of homologous recombination events, comprising the nucleic acids molecule used in the process of the present invention or parts thereof.

[0837] As described herein, the nucleic acid construct can also comprise further genes, which are to be introduced into the organisms or cells. It is possible and advantageous to introduce into, and express in, the host organisms regulatory genes such as genes for inductors, repressors or enzymes, which, owing to their enzymatic activity, engage in the regulation of one or more genes of a biosynthetic pathway. These genes can be of heterologous or homologous origin. Moreover, further biosynthesis genes may advantageously be present, or else these genes may be located on one or more further nucleic acid constructs.

[0838] As described herein, regulator sequences or factors can have a positive effect on preferably the expression of the constructs introduced, thus increasing it. Thus, an enhancement of the regulator elements may advantageously take place at the transcriptional level by using strong transcription signals such as promoters and/or enhancers. In addition, however, an enhancement of translation is also possible, for example by increasing RNA stability. On the other hand the nucleic acid molecule described herein to be reduces according to the process of the invention and the gene products are reduced, decreased or deleted to increase the tolerance and/or resistance to environmental stress and the biomass production as compared to a corresponding non-transformed wild type plant.

[0839] In principle, the nucleic acid construct can comprise the herein described regulator sequences and further sequences relevant for the reduction of the expression of nucleic acid molecules to be reduced according to the process of the invention and on the other side for the expression of additional genes in the construct.

[0840] Thus, the nucleic acid construct of the invention can be used as expression cassette and thus can be used directly for introduction into the plant, or else they may be introduced into a vector. Accordingly in one embodiment the nucleic acid construct is an expression cassette comprising a microorganism promoter or a microorganism terminator or both. In another embodiment the expression cassette encompasses a plant promoter or a plant terminator or both.

[0841] Accordingly, in one embodiment, the process according to the invention comprises the following steps:
[0842] a) introduction of a nucleic acid construct comprising a nucleic acid molecule to be used in the process of the invention, e.g. which encodes an antisense, RNAi, snRNA, dsRNA, siRNA, miRNA, ta-siRNA, cosuppression molecule, or ribozyme molecule of the invention or the cosuppression nucleic acid molecule or the viral degradation nucleic acid molecule of the invention or encoding a DNA-, RNA- or protein-binding factor against genes, RNA's or proteins, a dominant negative mutant, or an antibody of the invention or which is suitable for a recombination, in particular a homologous recombination; or
[0843] b) introduction of a nucleic acid molecule, including regulatory sequences or factors, which expression increases the expression (a);
   in a cell, or an organism or a part thereof, preferably in a plant or plant cell, and
[0844] c) repressing, reducing or deleting the activity to be reduced in the process of the invention by the nucleic acid constructor the nucleic acid molecule mentioned under (a) or (b) in the cell or the organism.

[0845] After the introduction and expression of the nucleic acid construct the transgenic organism or cell is advantageously cultured and subsequently harvested. The transgenic organism or cell may be a eukaryotic organism such as a plant, a plant cell, a plant tissue, preferably a crop plant, or a part thereof.

[0846] To introduce a nucleic acid molecule for the reduction or repression of a polynucleotide or gene comprising a nucleic acid molecule shown in column 5 or 7 of Table I, or a homologue thereof, or a gene product of said polynucleotide, for e.g. which encodes an antisense, RNAi, snRNA, dsRNA, siRNA, miRNA, ta-siRNA, cosuppression molecule, or ribozyme molecule of the invention or the cosuppression nucleic acid molecule or the viral degradation nucleic acid molecule of the invention or encoding a DNA-, RNA- or protein-binding factor against genes, RNA's or proteins, a dominant negative mutant, or an antibody of the invention or which is suitable for a recombination, in particular a homologous recombination or a mutagenized nucleic acid sequence, into a nucleic acid construct, e.g. as part of an expression cassette, which leads to a reduced activity and/or expression of the respective gene, the codogenic gene segment or the untranslated regions are advantageously subjected to an amplification and ligation reaction in the manner known by a skilled person. It is preferred to follow a procedure similar to the protocol for the Pfu DNA polymerase or a Pfu/Taq DNA polymerase mixture. The primers are selected according to the sequence to be amplified. The specific cloning of antisense, RNAi, snRNA, dsRNA, siRNA, miRNA, ta-siRNA, cosuppression constructs, or ribozyme molecules of the invention or the cosuppression constructs or the viral degradation constructrs or constructs encoding a DNA-, RNA- or protein-binding factor against genes, RNAs or proteins, or constructs for a dominant negative mutant, or an antibody of the invention or of constructs which are suitable for a recombination, in particular a homologous recombination are know to the person skilled in the art. Suitable cloning vectors are generally known to the skilled worker [Cloning Vectors (Eds. Pouwels P. H. et al. Elsevier, Amsterdam-New York-Oxford, 1985, ISBN 0 444 904018)] and have been published, e.g. Earley et al., Plant J. 2006 February; 45 (4): 616-629; Lu et al., Nucleic Acids Res. 2004 Dec. 2; 32 (21): e171; Tao and Xhou, Plant J. 2004 June; 38 (5): 850-860; Miki and Shimamoto Plant Cell Physiol. 2004 April; 45(4):490-495; Akashi et al. , Methods Mol Biol. 2004; 252: 533-43; Wesley et al., Plant J. 2001 September; 27(6): 581-590.

[0847] They include, in particular, vectors which are capable of replication in easy to handle cloning systems like bacterial yeast or insect cell based (e.g. baculovirus expression) systems, that is to say especially vectors which ensure efficient cloning in E. coli, and which make possible the stable transformation of plants. Vectors, which must be mentioned, in particular are various binary and cointegrated vector systems, which are suitable for the T-DNA-mediated transformation. Such vector systems are generally characterized in that they contain at least the vir genes, which are required for the Agrobacterium-mediated transformation, and the T-DNA border sequences.

[0848] In general, vector systems preferably also comprise further cisregulatory regions such as promoters and terminators and/or selection markers by means of which suitably transformed organisms can be identified. While vir genes and T-DNA sequences are located on the same vector in the case of cointegrated vector systems, binary systems are based on at least two vectors, one of which bears vir genes, but no T-DNA, while a second one bears T-DNA, but no vir gene. Owing to this fact, the last-mentioned vectors are relatively small, easy to manipulate and capable of replication in E. coli and in Agrobacterium. These binary vectors include vectors from the series pBIB-HYG, pPZP, pBecks, pGreen. Those, which are preferably used in accordance with the invention, are Bin19, pB1101, pBinAR, pSun, pGPTV and pCAM-BIA. An overview of binary vectors and their use is given by Hellens et al, Trends in Plant Science (2000) 5, 446-451.

[0849] For a construct preparation, vectors may first be linearized using restriction endonuclease(s) and then be modified enzymatically in a suitable manner. Thereafter, the vector is purified, and an aliquot is employed in the cloning step. In the cloning step, the enzyme-cleaved and, if required, purified amplificate is cloned together with similarly prepared vector fragments, using ligase. Alternatively constructs can be prepared be recombination or ligation independent cloning procedure, know to the person skilled in the art. Generally, a specific nucleic acid construct, or vector or plasmid construct, may have one or else more nucleic acid fragments segments. The nucleic acid fragments in these constructs are preferably linked operably to regulatory sequences. The regulatory sequences include, in particular, plant sequences like the above-described promoters and terminators. The constructs can advantageously be propagated stably in microorganisms, in particular Escherichia coli and/or Agrobacterium tumefaciens, under selective conditions and enable the transfer of heterologous DNA into plants or other microorganisms. In accordance with a particular embodiment, the constructs are based on binary vectors (overview of a binary vector: Hellens et al., 2000). As a rule, they contain prokaryotic regulatory sequences, such as replication origin and selection markers, for the multiplication in microorganisms such as Escherichia coli and Agrobacterium tumefaciens. Vectors can further contain agrobacterial T-DNA sequences for the transfer of DNA into plant genomes or other eukaryotic regulatory sequences for transfer into other eukaryotic cells, e.g. Saccharomyces sp. or other prokaryotic regulatory sequences for the transfer into other prokaryotic cells, e.g. Corynebacterium sp. or Bacillus sp. For the transformation of plants, at least the right border sequence, which comprises approximately 25 base pairs, of the total agrobacterial T-DNA sequence is required. Usually, the plant transformation vector constructs according to the invention contain T-DNA sequences both from the right and from the left border region, which contain expedient recognition sites for site-specific acting enzymes, which, in turn, are encoded by some of the vir genes. Different types of repression constructs, e.g. antisense, cosuppression, RNAi, miRNA and so forth need different cloning strategies as described herein.

[0850] Advantageously preferred in accordance with the invention are plants host organisms. Preferred plants are selected from among the families Aceraceae, Anacardiaceae, Apiaceae, Asteraceae, Apiaceae, Betulaceae, Boraginaceae, Brassicaceae, Bromeliaceae, Cactaceae, Caricaceae, Caryophyllaceae, Cannabaceae, Convolvulaceae, Chenopodiaceae, Elaeagnaceae, Geraniaceae, Gramineae, Juglandaceae, Lauraceae, Leguminosae, Linaceae, Cucurbitaceae, Cyperaceae, Euphorbiaceae, Fabaceae, Malvaceae, Nymphaeaceae, Papaveraceae, Rosaceae, Salicaceae, Solanaceae, Arecaceae, lridaceae, Liliaceae, Orchidaceae, Gentianaceae, Labiaceae, Magnoliaceae, Ranunculaceae, Carifolaceae, Rubiaceae, Scrophulariaceae, Ericaceae, Polygonaceae, Violaceae, Juncaceae, Poaceae, perennial grass, fodder crops, vegetables and ornamentals.

[0851] Especially preferred are plants selected from the groups of the families Apiaceae, Asteraceae, Brassicaceae, Cucurbitaceae, Fabaceae, Papaveraceae, Rosaceae, Solanaceae, Liliaceae or Poaceae. Especially advantageous are, in particular, crop plants. Accordingly, an advantageous plant preferably belongs to the group of the genus peanut, oilseed rape, canola, sunflower, safflower, olive, sesame, hazelnut, almond, avocado, bay, pumpkin/squash, linseed, soya, pistachio, borage, maize, wheat, rye, oats, sorghum and millet, triticale, rice, barley, cassava, potato, sugarbeet, fodder beet, egg plant, and perennial grasses and forage plants, oil palm, vegetables (brassicas, root vegetables, tuber vegetables, pod vegetables, fruiting vegetables, onion vegetables, leafy vegetables and stem vegetables), buckwheat, Jerusalem artichoke, broad bean, vetches, lentil, alfalfa, dwarf bean, lupin, clover and lucerne.

[0852] In one embodiment of the invention host plants are selected from the group comprising corn, soy, oil seed rape (including canola and winter oil seed reap), cotton, wheat and rice.

[0853] Further preferred plants are mentioned above.

[0854] In order to reduce or repress the activity of a gene product according to the process of the invention by introducing, into a plant the nucleic acid molecule used in the process of the invention, for example an isolated antisense, RNAi, snRNA, dsRNA, siRNA, miRNA, ta-siRNA, cosuppression molecule, or ribozyme molecule or a cosuppression nucleic acid molecule or a viral degradation nucleic acid molecule or a recombination nucleic acid molecule or a mutagenized nucleic acid sequence, advantageously is first transferred into an intermediate host, for example a bacterium or a eukaryotic unicellular cell. The transformation into E. coli, which can be carried out in a manner known per se, for example by means of heat shock or electroporation, has proved itself expedient in this context.

[0855] The nucleic acid constructs, which are optionally verified, are subsequently used for the transformation of the plants. To this end, it may first be necessary to obtain the constructs from the intermediate host. For example, the constructs may be obtained as plasmids from bacterial hosts by a method similar to conventional plasmid isolation.

[0856] Gene silencing in plants can advantageously achieved by transient transformation technologies, meaning that the nucleic acids are preferably not integrated into the plant genome. Suitable systems for transient plant transformations are for example agrobacterium based and plant virus based systems. Details about virus based transient systems and their use for gene silencing in plants have been described in Lu et al. in Methods 2003, 30(4) 296-303. The use of agrobacterium for the transient expression of nucleic acids in plants have been described for example by Fuentes et al., 2003 in Biotechnol Appl Biochem. 2003 Nov. 21 online: doi:10.1042/BA20030192).

[0857] A large number of methods for the transformation of plants are known. Since, in accordance with the invention, a stable integration of heterologous DNA into the genome of plants is advantageous, the T-DNA-mediated transformation has proved expedient in particular. For this purpose, it is first necessary to transform suitable vehicles, in particular agrobacteria, with a gene segment or the corresponding plasmid construct comprising the nucleic acid molecule to be transformed, e.g. a nucleic acid molecule suitable for the process of invention, e.g. as described herein, e.g. an isolated antisense, RNAi, snRNA, dsRNA, siRNA, miRNA, ta-siRNA, cosuppression molecule, or ribozyme molecule or a cosuppression nucleic acid molecule or a viral degradation nucleic acid molecule or a recombination nucleic acid molecule or an other polynucleotide capable to reduce or repress the expression of a gene product as shown in column 5 or 7 of Table II, or in column 5 or 7, Table I, or a homologue thereof.

[0858] This can be carried out in a manner known per se. For example, said nucleic acid construct of the invention, or said expression construct or said plasmid construct, which has been generated in accordance with what has been detailed above, can be transformed into competent agrobacteria by means of electroporation or heat shock. In principle, one must differentiate between the formation of cointegrated vectors on the one hand and the transformation with binary vectors on the other hand. In the case of the first alternative, the constructs, which comprise the codogenic gene segment or the nucleic acid molecule for the use according to the process of the invention have no T-DNA sequences, but the formation of the cointegrated vectors or constructs takes place in the agrobacteria by homologous recombination of the construct with T-DNA. The T-DNA is present in the agrobacteria in the form of Ti or Ri plasmids in which exogenous DNA has expediently replaced the oncogenes. If binary vectors are used, they can be transferred to agrobacteria either by bacterial conjugation or by direct transfer. These agrobacteria expediently already comprise the vector bearing the vir genes (currently referred to as helper Ti(Ri) plasmid).

[0859] In addition the stable transformation of plastids might be of advantageous in some cases because plastids are inherited maternally in most crops reducing or eliminating the risk of transgene flow through pollen. The process of the transformation of the chloroplast genome is generally achieved by a process which has been schematically displayed in Klaus et al., 2004, Nature Biotechnology 22(2), 225-229). Plastidal transformation might especially advantageously for the repression of plastidal encoded nucleic acids of the invention.

[0860] Briefly the sequences to be transformed are cloned together with a selectable marker gene between flanking sequences homologous to the chloroplast genome. These homologous flanking sequences direct site specific intergration into the plastome. Plastidal transformation has been described for many different plant species and an overview can be taken from Bock et al. (2001) Transgenic plastids in basic research and plant biotechnology. J Mol Biol. 2001 Sep. 21; 312(3): 425-38, or Maliga, P , Progress towards commercialization of plastid transformation technology. Trends Biotechnol. 21, 20-28 (2003). Further biotechnological progress has recently been reported in form of marker free plastid transformants, which can be produced by a transient cointegrated maker gene, Klaus et al., 2004, Nature Biotechnology 22(2), 225-229.

[0861] One or more markers may expediently also be used together with the nucleic acid construct, or the vector and, if plants or plant cells shall be transformed together with the T-DNA, with the aid of which the isolation or selection of transformed organisms, such as agrobacteria or transformed plant cells, is possible. These marker genes enable the identification of a successful transfer of the nucleic acid molecules according to the invention via a series of different principles, for example via visual identification with the aid of fluorescence, luminescence or in the wavelength range of light which is discernible for the human eye, by a resistance to herbicides or antibiotics, via what are known as nutritive markers (auxotrophism markers) or antinutritive markers, via enzyme assays or via phytohormones. Examples of such markers which may be mentioned are GFP (=green fluorescent protein); the luciferin/luceferase system, the -galactosidase with its colored substrates, for example X-Gal, the herbicide resistances to, for example, imidazolinone, glyphosate, phosphinothricin or sulfonylurea, the antibiotic resistances to, for example, bleomycin, hygromycin, streptomycin, kanamycin, tetracyclin, chloramphenicol, ampicillin, gentamycin, geneticin (G418), spectinomycin or blasticidin, to mention only a few, nutritive markers such as the utilization of mannose or xylose, or antinutritive markers such as the resistance to 2-deoxyglucose or D-amino acids (Erikson et al., 2004, Nature Biotech 22(4), 455-458). This list is a small number of possible markers. The skilled worker is very familiar with such markers. Different markers are preferred, depending on the organism and the selection method.

[0862] As a rule, it is desired that the plant nucleic acid constructs are flanked by T-DNA at one or both sides of the gene segment. This is particularly useful when bacteria of the species Agrobacterium tumefaciens or Agrobacterium rhizogenes are used for the transformation. A method, which is preferred in accordance with the invention, is the transformation with the aid of Agrobacterium tumefaciens. However, biolistic methods may also be used advantageously for introducing the sequences in the process according to the invention, and the introduction by means of PEG is also possible. The transformed agrobacteria can be grown in the manner known per se and are thus available for the expedient transformation of the plants. The plants or plant parts to be transformed are grown or provided in the customary manner. The transformed agrobacteria are subsequently allowed to act on the plants or plant parts until a sufficient transformation rate is reached. Allowing the agrobacteria to act on the plants or plant parts can take different forms. For example, a culture of morphogenic plant cells or tissue may be used. After the T-DNA transfer, the bacteria are, as a rule, eliminated by antibiotics, and the regeneration of plant tissue is induced. This is done in particular using suitable plant hormones in order to initially induce callus formation and then to promote shoot development.

[0863] The transfer of foreign genes into the genome of a plant is called transformation. In doing this the methods described for the transformation and regeneration of plants from plant tissues or plant cells are utilized for transient or stable transformation. An advantageous transformation method is the transformation in planta. To this end, it is possible, for example, to allow the agrobacteria to act on plant seeds or to inoculate the plant meristem with agrobacteria. It has proved particularly expedient in accordance with the invention to allow a suspension of transformed agrobacteria to act on the intact plant or at least the flower primordia. The plant is subsequently grown on until the seeds of the treated plant are obtained (Clough and Bent, Plant J. (1998) 16, 735-743). To select transformed plants, the plant material obtained in the transformation is, as a rule, subjected to selective conditions so that transformed plants can be distinguished from untransformed plants. For example, the seeds obtained in the above-described manner can be planted and, after an initial growing period, subjected to a suitable selection by spraying. A further possibility consists in growing the seeds, if appropriate after sterilization, on agar plates using a suitable selection agent so that only the transformed seeds can grow into plants. Further advantageous transformation methods, in particular for plants, are known to the skilled worker and are described hereinbelow.

[0864] Further advantageous suitable methods are protoplast transformation by poly(ethylene glycol)-induced DNA uptake, the “biolistic” method using the gene cannon—referred to as the particle bombardment method, electroporation, the incubation of dry embryos in DNA solution, microinjection and gene transfer mediated by Agrobacterium. Said methods are described by way of example in B. Jenes et al., Techniques for Gene Transfer, in: Transgenic Plants, Vol. 1, Engineering and Utilization, eds. S. D. Kung and R. Wu, Academic Press (1993) 128-143 and in Potrykus Annu. Rev. Plant Physiol. Plant Molec. Biol. 42 (1991) 205-225). The nucleic acids or the construct to be expressed is preferably cloned into a vector, which is suitable for transforming Agrobacterium tumefaciens, for example pBin19 (Bevan et al., Nucl. Acids Res. 12 (1984) 8711). Agrobacteria transformed by such a vector can then be used in known manner for the transformation of plants, in particular of crop plants such as by way of example tobacco plants, for example by bathing bruised leaves or chopped leaves in an agrobacterial solution and then culturing them in suitable media. The transformation of plants by means of Agrobacterium tumefaciens is described, for example, by Hofgen and Willmitzer in Nucl. Acid Res. (1988) 16, 9877 or is known inter alia from F. F. White, Vectors for Gene Transfer in Higher Plants; in Transgenic Plants, Vol. 1, Engineering and Utilization, eds. S.D. Kung and R. Wu, Academic Press, 1993, pp. 15-38.

[0865] The abovementioned nucleic acid molecules can be cloned into the nucleic acid constructs or vectors according to the invention in combination together with further genes, or else different genes are introduced by transforming several nucleic acid constructs or vectors (including plasmids) into a host cell, advantageously into a plant cell.

[0866] In one embodiment, in the process according to the invention, the nucleic acid sequences used in the process according to the invention can be advantageously linked operably to one or more regulatory signals in order to increase gene expression for example if an antisense, RNAi, snRNA, dsRNA, siRNA, miRNA, ta-siRNA, cosuppression molecule, or ribozyme molecule of the invention or the cosuppression nucleic acid molecule or the viral degradation nucleic acid molecule of the invention or encoding a DNA-, RNA- or protein-binding factor against genes, RNA's or proteins, a dominant negative mutant, or an antibody of the invention.

[0867] These regulatory sequences are intended to enable the specific expression of nucleic acid molecules, e.g. the genes or gene fragments or of the gene products or the nucleic acid used in the process of the invention. Depending on the host organism for example plant or microorganism, this may mean, for example, that the gene or gene fragment or inhibition constructs is expressed and/or overexpressed after induction only, or that it is expressed and/or overexpressed constitutive. These regulatory sequences are, for example, sequences to which the inductors or repressors bind and which thus regulate the expression of the nucleic acid

[0868] Moreover, the gene construct can advantageously also comprise one or more of what are known as enhancer sequences in operable linkage with the promoter, and these enable an increased expression of the nucleic acid sequence. Also, it is possible to insert additional advantageous sequences at the 3′ end of the DNA sequences, such as, for example, further regulatory elements or terminators.

[0869] The nucleic acid molecules, which encode proteins according to the invention and nucleic acid molecules, which encode other polypeptides may be present in one nucleic acid construct or vector or in several ones. In one embodiment, only one copy of the nucleic acid molecule for use in the process of the invention or its encoding genes is present in the nucleic acid construct or vector. Several vectors or nucleic acid construct or vector can be expressed together in the host organism. The nucleic acid molecule or the nucleic acid construct or vector according to the invention can be inserted in a vector and be present in the cell in a free form. If a stable transformation is preferred, a vector is used, which is stably duplicated over several generations or which or a part of which is else be inserted into the genome. In the case of plants, integration into the plastid genome or, in particular, into the nuclear genome may have taken place. For the insertion of more than one constructs in the host genome the constructs to be expressed might be present together in one vector, for example in above-described vectors bearing a plurality of constructs.

[0870] As a rule, regulatory sequences for the expression rate of a constructs, for example a inhibition constructs like RNAi, miRNA, antisense, cosuppresion constructs are located upstream (5′), within, and/or downstream (3′) relative to the sequence of the nucleic acid molecule to be regulated. They control in particular transcription and/or translation and/or the transcript stability. The expression level is dependent on the conjunction of further cellular regulatory systems, such as the protein biosynthesis and degradation systems of the cell.

[0871] Regulatory sequences include transcription and translation regulating sequences or signals, e.g. sequences located upstream (5′), which concern in particular the regulation of transcription or translation initiation, such as promoters or start codons, and sequences located downstream (3′), which concern in particular the regulation of transcription or translation termination and transcript stability, such as polyadenylation signals or stop codons. Regulatory sequences can also be present in transcribed coding regions as well in transcribed non-coding regions, e.g. in introns, as for example splicing sites.

[0872] Promoters for the regulation of expression of the nucleic acid molecule according to the invention in a cell and which can be employed are, in principle, all those which are capable of reducing the transcription of the nucleic acid molecules if they replace an endogenous promoter or which can stimulate the transcription of inhibiotory constructs for example an antisense, RNAi, snRNA, dsRNA, siRNA, miRNA, ta-siRNA, cosuppression molecule, or ribozyme molecule of the invention or the cosuppression nucleic acid molecule or the viral degradation nucleic acid molecule of the invention or constructs encoding a DNA-, RNA- or protein-binding factor against genes, RNA's or proteins, a dominant negative mutant, or an antibody of the inventionSuitable promoters, which are functional in these organisms, are generally known. They may take the form of constitutive or inducible promoters. Suitable promoters can enable the development- and/or tissue-specific expression in multi-celled eukaryotes; thus, leaf-, root-, flower-, seed-, stomata-, tuber- or fruit-specific promoters may advantageously be used in plants.

[0873] In principle, it is possible to use natural promoters together with their regulatory sequences, such as those mentioned above, for the novel process. It is also possible advantageously to use synthetic promoters, either additionally or alone, in particular when they mediate seed-specific expression such as described in, for example, WO 99/16890.

[0874] The expression of the nucleic acid molecules used in the process may be desired alone or in combination with other genes or nucleic acids. Multiple nucleic acid molecules conferring repression or expression of advantageous further genes, depending on the goal to be reached, can be introduced via the simultaneous transformation of several individual suitable nucleic acid constructs, i.e. expression constructs, or, preferably, by combining several expression cassettes on one construct. It is also possible to transform several vectors with in each case several expression cassettes stepwise into the recipient organism.

[0875] As described above, the transcription of the genes, which are in addition to the introduced nucleic acid molecules to be expressed or the genes introduced can advantageously be terminated by suitable terminators at the 3′ end of the biosynthesis genes introduced (behind the stop codon). Terminator, which may be used for this purpose are, for example, the OCS1 terminator, the nos3 terminator or the 35S terminator. As is the case with the promoters, different terminator sequences can be used for each gene. Terminators, which are useful in microorganism, are for example the fimA terminator, the txn terminator or the trp terminator. Such terminators can be rho-dependent or rho-independent.

[0876] Different plant promoters such as, for example, the USP, the LegB4-, the DC3 promoter or the ubiquitin promoter from parsley or other herein mentioned promoter and different terminators may advantageously be used in the nucleic acid construct useful for the reduction of the nucleic acid molecule shown in column 5 or 7 of Table I or its homologues mentioned herein. Further useful plant promoters are for example the maize ubiquitin promoter, the ScBV (Sugarcaine bacilliform virus) promoter, the Ipt2 or Ipt1-gene promoters from barley (WO 95/15389 and WO 95/23230) or those described in WO 99/16890 (promoters from the barley hordein-gene, the rice glutelin gene, the rice oryzin gene, the rice prolamin gene, the wheat gliadin gene, wheat glutelin gene, the maize zein gene, the oat glutelin gene, the Sorghum kasirin-gene, the rye secalin gene).

[0877] In order to ensure the stable integration, into the transgenic plant, of nucleic acid molecules used in the process according to the invention in combination with further biosynthesis genes over a plurality of generations, each of the coding regions used in the process can be expressed under the control of its own, preferably unique, promoter.

[0878] The nucleic acid construct is advantageously constructed in such a way that a promoter is followed by a suitable cleavage site for insertion of the nucleic acid to be expressed, advantageously in a polylinker, followed, if appropriate, by a terminator located behind the polylinker. If appropriate, this order is repeated several times so that several genes are combined in one construct and thus can be introduced into the transgenic plant in order to be expressed. The sequence is a for example repeated up to three times. For the expression, the nucleic acid sequences are inserted via the suitable cleavage site, for example in the polylinker behind the promoter. It is advantageous for each nucleic acid sequence to have its own promoter and, if appropriate, its own terminator, as mentioned above. However, it is also possible to insert several nucleic acid sequences behind a promoter and, if appropriate, before a terminator, in particular, if a polycistronic transcription is possible in the host or target cells. In this context, the insertion site, or the sequence of the nucleic acid molecules inserted, in the nucleic acid construct is not decisive, that is to say a nucleic acid molecule can be inserted in the first or last position in the cassette without this having a substantial effect on the expression. However, it is also possible to use only one promoter type in the construct.

[0879] Accordingly, in a preferred embodiment, the nucleic acid construct according to the invention confers the reduction or repression of a nucleic acid molecule comprising the polynucleotide as depicted in column 5 or 7 of Table I or an encoded gene product, e.g. a polypeptide as depicted in column 5 or 7 of Table II or encompassing a consensus sequence or a polypeptide motif as depicted in column 7 of Table IV, or a homologue thereof described herein and, optionally further genes, in a plant and comprises one or more plant regulatory elements. Said nucleic acid construct according to the invention advantageously encompasses a plant promoter or a plant terminator or a plant promoter and a plant terminator. It further encodes for example isolated nucleic acid molecule of the invention encoding an antisense, RNAi, snRNA, dsRNA, siRNA, miRNA, ta-siRNA, or ribozyme molecule of the invention or the cosuppression nucleic acid molecule or the viral degradation nucleic acid molecule of the invention or encoding a DNA-, RNA- or protein-binding factor against genes, RNA's or proteins, a dominant negative mutant, or an antibody of the invention or the nucleic acid molecule for a recombination of the invention.

[0880] A “plant” promoter comprises regulatory elements, which mediate the expression of a coding sequence segment in plant cells. Accordingly, a plant promoter need not be of plant origin, but may originate from viruses or microorganisms, in particular for example from viruses which attack plant cells.

[0881] The plant promoter can also originate from a plant cell, e.g. from the plant, which is transformed with the nucleic acid construct or vector as described herein. This also applies to other “plant” regulatory signals, for example in “plant” terminators.

[0882] A nucleic acid construct suitable for plant expression preferably comprises regulatory elements which are capable of controlling the expression of genes in plant cells and which are operably linked so that each sequence can fulfill its function. Accordingly, the nucleic acid construct can also comprise transcription terminators. Examples for transcriptional termination are polyadenylation signals. Preferred polyadenylation signals are those which originate from Agrobacterium tumefaciens T-DNA, such as the gene 3 of the Ti plasmid pTiACH5, which is known as octopine synthase (Gielen et al., EMBO J. 3 (1984) 835 et seq.) or functional equivalents thereof, but all the other terminators which are functionally active in plants are also suitable.

[0883] In case a nucleic acid construct suitable for plant expression is used for the expression of a polypeptide preferably it also comprises other operably linked regulatory elements such as translation enhancers, for example the overdrive sequence, which comprises the tobacco mosaic virus 5′-untranslated leader sequence, which increases the protein/RNA ratio (Gallie et al., 1987, Nucl. Acids Research 15:8693-8711).

[0884] For expression in plants, the nucleic acid molecule must, as described above, be linked operably to or comprise a suitable promotor which expresses for example the antisense, RNAi, snRNA, dsRNA, siRNA, miRNA, ta-siRNA, cosuppression molecule, or ribozyme molecule of the invention or the cosuppression nucleic acid molecule or the viral degradation nucleic acid molecule of the invention or encoding a DNA-, RNA- or protein-binding factor against genes, RNA's or proteins, a dominant negative mutant, or an antibody of the invention at the right point in time and in a cell- or tissue-specific manner. Usable promoters are constitutive promoters (Benfey et al., EMBO J. 8 (1989) 2195-2202), such as those which originate from plant viruses, such as 35S CAMV (Franck et al., Cell 21 (1980) 285-294), 19S CaMV (see also U.S. Pat. No. 5,352,605 and WO 84/02913), 34S FMV (Sanger et al., Plant. Mol. Biol., 14, 1990: 433-443), the parsley ubiquitin promoter, or plant promoters such as the Rubisco small subunit promoter described in U.S. Pat. No. 4,962,028 or the plant promoters PRP1 [Ward et al., Plant. Mol. Biol. 22 (1993)], SSU, PGEL1, OCS [Leisner (1988) Proc Natl Acad Sci USA 85(5): 2553-2557], lib4, usp, mas [Comai (1990) Plant Mol Biol 15 (3):373-381], STLS1, ScBV (Schenk (1999) Plant Mol Biol 39(6):1221-1230), B33, SAD1 or SAD2 (flax promoters, Jain et al., Crop Science, 39 (6), 1999: 1696-1701) or nos [Shaw et al. (1984) Nucleic Acids Res. 12(20):7831-7846]. Stable, constitutive expression of the antisense, RNAi, snRNA, dsRNA, siRNA, miRNA, ta-siRNA, cosuppression molecule, or the ribozyme molecule of the invention or the cosuppression nucleic acid molecule or the viral degradation nucleic acid molecule of the invention or encoding a DNA-, RNA- or protein-binding factor against genes, RNA's or proteins, a dominant negative mutant, or an antibody of the invention can be advantageous. However, inducible expression of the nucleic acid molecule for the reduction of a nucleic acid molecule usuable for the process of the invention is advantageous, if a late expression before the harvest is of advantage, as metabolic manipulation may lead to plant growth retardation.

[0885] The expression of the nucleic acid molecule for the reduction of a nucleic acid molecule usuable for the process of the invention is can also be facilitated as described above via a chemical inducible promoter (for a review, see Gatz 1997, Annu. Rev. Plant Physiol. Plant Mol. Biol., 48:89-108). Chemically inducible promoters are particularly suitable when it is desired to express the gene in a time-specific manner. Examples of such promoters are a salicylic acid inducible promoter (WO 95/19443), and abscisic acid-inducible promoter (EP 335 528), a tetracyclin-inducible promoter (Gatz et al. (1992) Plant J. 2, 397-404), a cyclohexanol- or ethanol-inducible promoter (WO 93/21334) or others as described herein.

[0886] Other suitable promoters are those which react to biotic or abiotic stress conditions, for example the pathogen-induced PRP1 gene promoter (Ward et al., Plant. Mol. Biol. 22 (1993) 361-366), the tomato heat-inducible hsp80 promoter (U.S. Pat. No. 5,187,267), the potato chill-inducible alpha-amylase promoter (WO 96/12814) or the wound-inducible pinll promoter (EP-A-0 375 091) or others as described herein.

[0887] Preferred promoters are in particular those which bring about gene expression in tissues and organs, in seed cells, such as endosperm cells and cells of the developing embryo.

[0888] Suitable promoters are the oilseed rape napin gene promoter (U.S. Pat. No. 5,608,152), the Vicia faba USP promoter (Baeumlein et al., Mol Gen Genet, 1991, 225 (3): 459-67), the Arabidopsis oleosin promoter (WO 98/45461), the Phaseolus vulgaris phaseolin promoter (U.S. Pat. No. 5,504,200), the Brassica Bce4 promoter (WO 91/13980), the bean arc5 promoter, the carrot DcG3 promoter, or the Legumin B4 promoter (LeB4; Baeumlein et al., 1992, Plant Journal, 2 (2): 233-9), and promoters which bring about the seed-specific expression in monocotyledonous plants such as maize, barley, wheat, rye, rice and the like. Advantageous seed-specific promoters are the sucrose binding protein promoter (WO 00/26388), the phaseolin promoter and the napin promoter. Suitable promoters which must be considered are the barley Ipt2 or Ipt1 gene promoter (WO 95/15389 and WO 95/23230), and the promoters described in WO 99/16890 (promoters from the barley hordein gene, the rice glutelin gene, the rice oryzin gene, the rice prolamin gene, the wheat gliadin gene, the wheat glutelin gene, the maize zein gene, the oat glutelin gene, the sorghum kasirin gene and the rye secalin gene). Further suitable promoters are Amy32b, Amy 6-6 and Aleurain [U.S. Pat. No. 5,677,474], Bce4 (oilseed rape) [U.S. Pat. No. 5,530,149], glycinin (soya) [EP 571 741], phosphoenolpyruvate carboxylase (soya) [JP 06/62870], ADR12-2 (soya) [WO 98/08962], isocitrate lyase (oilseed rape) [U.S. Pat. No. 5,689,040] or α-amylase (barley) [EP 781 849]. Other promoters which are available for the expression of genes, e.g. of the nucleic acid molecule used in the process of the invention, in particular for the reduction of a nucleic acid molecule which activity is reduces in the process of the invention is in plants are leaf-specific promoters such as those described in DE-A 19644478 or light-regulated promoters such as, for example, the pea petE promoter.

[0889] Further suitable plant promoters are the cytosolic FBPase promoter or the potato ST-LSI promoter (Stockhaus et al., EMBO J. 8, 1989, 2445), the Glycine max phosphoribosylpyrophosphate amidotransferase promoter (GenBank Accession No. U87999) or the node-specific promoter described in EP-A-0 249 676.

[0890] Other promoters, which are suitable in specific cases are those which bring about plastid-specific expression. Suitable promoters such as the viral RNA polymerase promoter are described in WO 95/16783 and WO 97/06250, and the Arabidopsis clpP promoter, which is described in WO 99/46394.

[0891] Other promoters, which are used for the strong expression of heterologous sequences, e.g. the nucleic acid molecule used in the process of the invention, in particular for the reduction of a nucleic acid molecule which activity is reduced in the process of the invention is in as many tissues as possible, in particular also in leaves, are, in addition to several of the abovementioned viral and bacterial promoters, preferably, plant promoters of actin or ubiquitin genes such as, for example, the rice actin1 promoter. Further examples of constitutive plant promoters are the sugarbeet V-ATPase promoters (WO 01/14572). Examples of synthetic constitutive promoters are the Super promoter (WO 95/14098) and promoters derived from G-boxes (WO 94/12015). If appropriate, chemical inducible promoters may furthermore also be used, compare EP-A 388186, EP-A 335528, WO 97/06268.

[0892] Another embodiment of the invention is a nucleic acid construct conferring the expression of for example the antisense, RNAi, snRNA, dsRNA, siRNA, miR-NA, ta-siRNA, cosuppression molecule, or ribozyme molecule of the invention or the cosuppression nucleic acid molecule or the viral degradation nucleic acid molecule of the invention or encoding a DNA-, RNA- or protein-binding factor against genes, RNA's or proteins, a dominant negative mutant, or an antibody of the invention as used in the inventive process, suitable for the expression in plant.

[0893] Preferred recipient plants are, as described above, in particular those plants, which can be transformed in a suitable manner. These include monocotyledonous and dicotyledonous plants. Plants which must be mentioned in particular are agriculturally useful plants such as cereals and grasses, for example Triticum spp., Zea mays, Hordeum vulgare, oats, Secale cereale, Oryza sativa, Pennisetum glaucum, Sorghum bicolor, Triticale, Agrostis spp., Cenchrus ciliaris, Dactylis glomerata, Festuca arundinacea, Lolium spp., Medicago spp. and Saccharum spp., legumes and oil crops, for example Brassica juncea, Brassica napus, Glycine max, Arachis hypogaea, Gossypium hirsutum, Cicer arietinum, Helianthus annuus, Lens culinaris, Linum usitatissimum, Sinapis alba, Trifolium repens and Vicia narbonensis, vegetables and fruits, for example bananas, grapes, Lycopersicon esculentum, asparagus, cabbage, watermelons, kiwi fruit, Solanum tuberosum, Beta vulgaris, cassava and chicory, trees, for example Coffea species, Citrus spp., Eucalyptus spp., Picea spp., Pinus spp. and Populus spp., medicinal plants and trees, and flowers.

[0894] One embodiment of the present invention also relates to a method for generating a vector, which comprises the insertion, into a vector, of the nucleic acid molecule characterized herein, the nucleic acid molecule according to the invention or the expression cassette according to the invention. The vector can, for example, be introduced into a cell, e.g. a microorganism or a plant cell, as described herein for the nucleic acid construct, or below under transformation or transfection or shown in the examples. A transient or stable transformation of the host or target cell is possible, however, a stable transformation is preferred.

[0895] The vector according to the invention is preferably a vector, which is suitable for reducing, repressing, decreasing or deleting of the polypeptide according to the invention in a plant. The method can thus also encompass one or more steps for integrating regulatory signals into the vector, in particular signals, which mediate the reduction, decrease or deletion in an plant.

[0896] Accordingly, the present invention also relates to a vector comprising the nucleic acid molecule characterized herein as part of a nucleic acid construct suitable for plant expression or the nucleic acid molecule according to the invention.

[0897] A advantageous vector used in the process of the invention, e.g. the vector of the invention, comprises a nucleic acid molecule which encodes a nucleic acid molecule which is used in the process of the invention, or a nucleic acid construct suitable for the expression in plant comprising the nucleic acid molecules usable in the process of the invention as described above.

[0898] Accordingly, the recombinant expression vectors which are advantageously used in the process of the invention comprise the nucleic acid molecules used in the process according to the invention or the nucleic acid construct according to the invention in a form which is suitable for repressing the activity of a nucleic acid molecule comprising a polynucleotide as depicted in column 5 or 7 of Table I or of a polypeptide as depicted in column 5 or 7 of Table II, or a homologue thereof and/or in the same time expressing, in a host cell, additional genes, which are accompanied by the nucleic acid molecules according to the invention or described herein. Accordingly, the recombinant expression vectors comprise one or more regulatory signals selected on the basis of the host cells to be used for the expression, in operable linkage with the nucleic acid sequence to be expressed.

[0899] In accordance with the invention, the term “vector” refers to a nucleic acid molecule, which is capable of transporting another nucleic acid to which it is linked. One type of vector is a “plasmid”, which means a circular double-stranded DNA loop into which additional DNA segments can be ligated. A further type of vector is a viral vector, it being possible to ligate additional DNA segments into the viral genome. Certain vectors are capable of autonomous replication in a host cell into which they have been introduced (for example bacterial vectors with bacterial replication origin). Other preferred vectors are advantageously completely or partly integrated into the genome of a host cell when they are introduced into the host cell and thus replicate together with the host genome. Moreover, certain vectors are capable of controlling the expression of genes with which they are in operable linkage. In the present context, these vectors are referred to as “expression vectors”. As mentioned above, they are capable of autonomous replication or may be integrated partly or completely into the host genome. Expression vectors, which are suitable for DNA recombination techniques usually, take the form of plasmids. In the present description, “plasmid” and “vector” can be used interchangeably since the plasmid is the most frequently used form of a vector. However, the invention is also intended to encompass these other forms of expression vectors, such as viral vectors, which exert similar functions. The term vector is furthermore also to encompass other vectors which are known to the skilled worker, such as phages, viruses such as SV40, CMV, TMV, transposons, IS elements, phasmids, phagemids, cosmids, and linear or circular DNA.

[0900] In a recombinant expression vector, “operable linkage” means that the nucleic acid molecule of interest is linked to the regulatory signals in such a way that expression of the genes is possible: they are linked to one another in such a way that the two sequences fulfill the predicted function assigned to the sequence (for example in an in-vitro transcription/translation system, or in a host cell if the vector is introduced into the host cell).

[0901] The term “regulatory sequence” is intended to comprise promoters, enhancers and other expression control elements (for example polyadenylation signals). These regulatory sequences are described, for example, in Goeddel: Gene Expression Technology: Methods in Enzymology 185, Academic Press, San Diego, Calif. (1990), or see: Gruber and Crosby, in: Methods in Plant Molecular Biology and Biotechnolgy, CRC Press, Boca Raton, Fla., Ed.: Glick and Thompson, chapter 7, 89-108, including the references cited therein. Regulatory sequences encompass those, which control the constitutive expression of a nucleotide sequence in many types of host cells and those which control the direct expression of the nucleotide sequence in specific host cells only, and under specific conditions. The skilled worker knows that the design of the expression vector may depend on factors such as the selection of the host cell to be transformed, the extent to which the protein amount is reduced, and the like. A preferred selection of regulatory sequences is described above, for example promoters, terminators, enhancers and the like. The term regulatory sequence is to be considered as being encompassed by the term regulatory signal. Several advantageous regulatory sequences, in particular promoters and terminators are described above. In general, the regulatory sequences described as advantageous for nucleic acid construct suitable for expression are also applicable for vectors.

[0902] The recombinant expression vectors used can be designed specifically for the expression, in prokaryotic and/or eukaryotic cells, of nucleic acid molecules used in the process. This is advantageous since intermediate steps of the vector construction are frequently carried out in microorganisms for the sake of simplicity. For example, the genes according to the invention and other genes can be expressed in bacterial cells, insect cells (using baculovirus expression vectors), yeast cells and other fungal cells [Romanos (1992), Yeast 8:423-488; van den Hondel, (1991), in: More Gene Manipulations in Fungi, J. W. Bennet & L. L. Lasure, Ed., pp. 396-428: Academic Press: San Diego; and van den Hondel, C. A. M. J. J. (1991), in: Applied Molecular Genetics of Fungi, Peberdy, J. F., et al., Ed., pp. 1-28, Cambridge University Press: Cambridge], algae [Falciatore et al., 1999, Marine Biotechnology.1, 3:239-251] using vectors and following a transformation method as described in WO 98/01572, and preferably in cells of multi-celled plants [see Schmidt, R. and Willmitzer, L. (1988) Plant Cell Rep.:583-586; Plant Molecular Biology and Biotechnology, C Press, Boca Raton, Fla., chapter 6/7, pp.71-119 (1993); F. F. White, in: Transgenic Plants, Bd. 1, Engineering and Utilization, Ed.: Kung and R. Wu, Academic Press (1993), 128-43; Potrykus, Annu. Rev. Plant Physiol. Plant Molec. Biol. 42 (1991), 205-225 (and references cited therein)]. Suitable host cells are furthermore discussed in Goeddel, Gene Expression Technology: Methods in Enzymology 185, Academic Press, San Diego, Calif. (1990). As an alternative, the sequence of the recombinant expression vector can be transcribed and translated in vitro, for example using T7 promotor-regulatory sequences and T7 polymerase.

[0903] In most cases, polynucleotides, as RNA, or polypeptides, or proteins can be expressed in prokaryotes using vectors comprising constitutive or inducible promoters, which control the expression of fusion proteins or nonfusion proteins. Typical fusion expression vectors are, inter alia, pGEX (Pharmacia Biotech Inc; Smith, D. B., and Johnson, K. S. (1988) Gene 67:31-40), pMAL (New England Biolabs, Beverly, Mass.) and pRIT5 (Pharmacia, Piscataway, N.J.), in which glutathione-S-transferase (GST), maltose-E-binding protein or protein A is fused with the recombinant target protein. Examples of suitable inducible nonfusion E. coli expression vectors are, inter alia, pTrc (Amann et al. (1988) Gene 69:301-315) and pET 11d [Studier et al., Gene Expression Technology: Methods in Enzymology 185, Academic Press, San Diego, Calif. (1990) 60-89]. The target gene expression of the pTrc vector is based on the transcription of a hybrid trp-lac fusion promoter by the host RNA polymerase. The target gene expression from the pET 11d vector is based on the transcription of a T7-gn10-lac fusion promoter, which is mediated by a coexpressed viral RNA polymerase (T7 gni). This viral polymerase is provided by the host strains BL21 (DE3) or HMS174 (DE3) by a resident “Symbol”-prophage, which harbors a T7 gn1 gene under the transcriptional control of the lacUV 5 promoter.

[0904] Other vectors which are suitable in prokaryotic organisms are known to the skilled worker; these vectors are for example in E. coli pLG338, pACYC184, the pBR series, such as pBR322, the pUC series such as pUC18 or pUC19, the M113mp series, pKC30, pRep4, pHS1, pHS2, pPLc236, pMBL24, pLG200, pUR290, pIN-III¹¹³-B1, “Symborgt11 or pBdCl, in Streptomyces pIJ101, pIJ364, pIJ702 or pIJ361, in Bacillus pUB110, pC194 or pBD214, in Corynebacterium pSA77 or pAJ667.

[0905] In a further embodiment, the expression vector is a yeast expression vector. Examples of vectors for expression in the yeasts S. cerevisiae encompass pY-eDesaturasec1 (Baldari et al. (1987) Embo J. 6:229-234), pMFa (Kurjan and Herskowitz (1982) Cell 30:933-943), pJRY88 (Schultz et al. (1987) Gene 54:113-123) and pYES2 (Invitrogen Corporation, San Diego, Calif.). Vectors and methods for the construction of vectors which are suitable for use in other fungi, such as the filamentous fungi, encompass those which are described in detail in: van den Hondel, C. A. M. J. J. [(1991), J. F. Peberdy, Ed., pp. 1-28, Cambridge University Press: Cambridge; or in: More Gene Manipulations in Fungi; J. W. Bennet & L. L. Lasure, Ed., pp. 396-428: Academic Press: San Diego]. Examples of other suitable yeast vectors are 2″Symbol”M, pAG-1, YEp6, YEp13 or pEMBLYe23.

[0906] Further vectors, which may be mentioned by way of example, are pALS1, plL2 or pBB116 in fungi or pLGV23, pGHlac⁺, pBIN19, pAK2004 or pDH51 in plants.

[0907] As an alternative, the nucleic acid sequences can be expressed in insect cells using baculovirus expression vectors. Baculovirus vectors which are available for expressing proteins in cultured insect cells (for example Sf9 cells) encompass the pAc series (Smith et al. (1983) Mol. Cell Biol. 3:2156-2165) and the pVL series (Lucklow and Summers (1989) Virology 170:31-39).

[0908] The abovementioned vectors are only a small overview of potentially suitable vectors. Further plasmids are known to the skilled worker and are described, for example, in: Cloning Vectors (Ed. Pouwels, P. H., et al., Elsevier, Amsterdam-New York-Oxford, 1985, ISBN 0 444 904018). Further suitable expression systems for prokaryotic and eukaryotic cells, see the chapters 16 and 17 by Sambrook, J., Fritsch, E. F., and Maniatis, T., Molecular Cloning: A Laboratory Manual, 2nd Edition, Cold Spring Harbor Laboratory, Cold Spring Harbor Laboratory Press, Cold Spring Harbor, N.Y., 1989.

[0909] Accordingly, one embodiment of the invention relates to a vector comprising a nucleic acid molecule for use in the process according to the invention or a nucleic acid construct for use in the process of the invention, e.g. the nucleic acid molecule or the nucleic acid construct of the invention encompassing an isolated nucleic acid molecule encoding an antisense, RNAi, snRNA, dsRNA, siRNA, miRNA, ta-siRNA, cosuppression molecule, or ribozyme molecule of the invention or the cosuppression nucleic acid molecule or the viral degradation nucleic acid molecule of the invention or encoding a DNA-, RNA- or protein-binding factor against genes, RNA's or proteins, a dominant negative mutant, or an antibody of the invention or the nucleic acid molecule for a recombination of the invention, in particular the nucleic acid molecute for a homologous recombination. Said vector is useful for the reduction, repression, decrease or deletion of the polypeptide according to the invention in an organism preferably in a plant. Advantageously said nucleic acid molecule is in an operable linkage with regulatory sequences for the expression in a prokaryotic or eukaryotic, or in a prokaryotic and a eukaryotic host. Furthermore vectors which are suitable for homologous recombination are also within the scope of the invention.

[0910] Accordingly, one embodiment of the invention relates to a host cell, which has been transformed stably or transiently with the vector usable in the process of the invention, in particular with the vector according to the invention or the nucleic acid molecule according to the invention or the nucleic acid construct according to the invention. Said host cell may be a microorganism, a non-human animal cell or a plant cell.

[0911] In one embodiment, the present invention relates to a polypeptide encoded by the nucleic acid molecule according to the present invention, e.g. encoded by a nucleic acid molecule as depicted in column 5 or 7 of Table IB, this means for example the present invention also relates to a polypeptide as depicted in column 5 or 7 of Table IIB, preferably conferring an increase in the tolerance and/or resistance to environmental stress and in the biomass production as compared to a corresponding nontransformed wild type plant after decreasing or repressing the expression or activity. Advantageously, said polypeptide or a fragment thereof, in particular an epitope or a haptene, which are all comprised by the term “polypeptide of the invention” can be used to produce or generate an antibody against said polypeptide. Advantageously, the antibody inactivates or reduces the activity of a polypeptide, which activity is reduced in the process of the present invention.

[0912] The present invention also relates to a process for the production of a polypeptide according to the present invention, the polypeptide being expressed in a host cell according to the invention, preferably in a microorganism, non-human animal cell or a transgenic plant cell.

[0913] In one embodiment, the nucleic acid molecule used in the process for the production of the polypeptide is derived from said microorganism, preferably from said prokaryotic or protozoic cell with said eukaryotic organism as host cell. In another embodiment the polypeptide is produced in said plant cell or plant with a nucleic acid molecule derived from a prokaryote or a fungus or an alga or another microorganism but not from plant. In another embodiment the polypeptide is produced in said plant cell or plant with a nucleic acid molecule derived from a plant or algae.

[0914] The skilled worker knows that protein and DNA expressed in different organisms differ in many respects and properties, e.g. methylation, degradation and post-translational modification as for example glucosylation, phosphorylation, acetylation, myristoylation, ADP-ribosylation, farnesylation, carboxylation, sulfation, ubiquination, etc. though having the same coding sequence. Preferably, the cellular expression control of the corresponding protein differs accordingly in the control mechanisms controlling the activity and expression of an endogenous protein or another eukaryotic protein. One major difference between proteins expressed in prokaryotic or eukaryotic organism is the amount of glycosylation. For example in E. coli there are no glycosylated proteins. Proteins expressed in yeasts have high mannose content in the glycosylated proteins, whereas in plants the glycosylation pattern is complex.

[0915] The polypeptide of the present invention is preferably produced by recombinant DNA techniques. For example, a nucleic acid molecule encoding the protein is cloned into a vector (as described above), the vector is introduced into a host cell (as described above) and said polypeptide is expressed in the host cell. Said polypeptide can then be isolated from the cells by an appropriate purification scheme using standard protein purification techniques. Alternative to recombinant expression, a polypeptide being encoded by a nucleic acid molecule comprising a nucleic acid molecule as depicted in column 5 or 7 of Table I or a homologue thereof, in particular a fragment or a peptide of the present invention can be synthesized chemically using standard peptide synthesis techniques. Moreover, native polypeptides having the same structure and preferably conferring the activity of the protein usable in the process of the invention can be isolated from cells (e.g., endothelial cells), for example using the antibody of the present invention as described below. The antibody can be produced by standard techniques utilizing the polypeptide usable in the process of the present invention or a fragment thereof, i.e., the polypeptide of this invention.

[0916] In one embodiment, the present invention relates to a polypeptide having the activity represented by a polypeptide comprising a polypeptide as depicted in column 5 or 7 of Table II or comprising a consensus sequence or a polypeptide motif as depicted in column 7 of Table IV, in particular an activity selected from the group consisting of: 1-phosphatidylinositol 4-kinase, amino acid permease (AAP1), At3g55990-protein, At5g40590-protein, ATP-dependent peptidase/ ATPase/nucleoside-triphosphatase/serine-type endopeptidase, DC1 domain-containing protein/pro-tein-binding protein/zinc ion binding protein, DNA binding protein/transcription factor, hydro-lyase/aconitate hydratase, metalloexopeptidase (MAP1C), methyltransferase, nitrate transporter (ATNRT2.3), nitrate/chlorate transporter (NRT1.1), pectate lyase protein/powdery mildew susceptibility protein (PMR6), peptidase/ubiquitin-protein ligase/zinc ion binding protein (JR700), proton-dependent oligopeptide transport protein, transcription factor, and/or ubiquitin conjugating enzyme/ubiquitin-like activating enzyme. Said polypeptide confers preferably the aforementioned activity, in particular, the polypeptide confers the increase of the tolerance and/or resistance to environmental stress and of the biomass production as compared to a corresponding non-transformed wild type plant after decreasing or repressing the cellular activity, e.g. by decreasing the expression or the specific activity of the polypeptide. In one embodiment, the present invention relates to a polypeptide having the amino acid sequence encoded by a nucleic acid molecule of the invention or obtainable by a process for the production of a polypeptide of the invention.

[0917] In one embodiment, said polypeptide distinguishes over the sequence as depicted in column 5 or 7 of Table IIA or B by one or more amino acid. In another embodiment, said polypeptide of the invention does not consist of the sequence as depicted in column 5 or 7 of Table IIA or B. In a further embodiment, said polypeptide of the present invention is less than 100%, 99,999%, 99,99%, 99,9% or 99% identical to column 5 or 7 of Table IIA or B.

[0918] Preferably, the sequence of the polypeptide of the invention distinguishes from the sequence as depicted in column 5 or 7 of Table IIA or B by not more than 80% or 70% of the amino acids, preferably not more than 60% or 50%, more preferred not more than 40% or 30%, even more preferred not more than 20% or 10%. In one embodiment, the polypeptide distinguishes form the sequence as depicted in column 5 or 7 of Table IIA or B by more than 5, 6, 7, 8 or 9 amino acids, preferably by more than 10, 15, 20, 25 or 30 amino acids, even more preferred are more than 40, 50, or 60 amino acids. In one embodiment, the polypeptide of the invention originates from a plant cell.

[0919] Preferably, the polypeptide is isolated. An “isolated” or “purified” protein or nucleic acid molecule or biologically active portion thereof is substantially free of cellular material when produced by recombinant DNA techniques, or chemical precursors or other chemicals when chemically synthesized.

[0920] The language “substantially free of cellular material” includes preparations of the polypeptide in which the protein is separated from cellular components of the cells in which it is naturally or recombinantly produced. In one embodiment, the language “substantially free of cellular material” includes preparations having less than about 30% (by dry weight) of “contaminating protein”, more preferably less than about 20% of “contaminating protein”, still more preferably less than about 10% of “contaminating protein”, and most preferably less than about 5% “contaminating protein”. The term “contaminating protein” relates to polypeptides, which are not polypeptides of the present invention. When the polypeptide of the present invention or biologically active portion thereof is recombinantly produced, it is also preferably substantially free of culture medium, i.e., culture medium represents less than about 20%, more preferably less than about 10%, and most preferably less than about 5% of the volume of the protein preparation. The language “substantially free of chemical precursors or other che-micals” includes preparations in which the polypeptide of the present invention is separated from chemical precursors or other chemicals, which are involved in the synthesis of the protein. The language “substantially free of chemical precursors or other chemicals” includes preparations having less than about 30% (by dry weight) of chemical precursors or other proteins or chemicals which are not identical to the protein, more preferably less than about 20% chemical precursors or other proteins or chemicals, still more preferably less than about 10% chemical precursors or other proteins or chemicals, and most preferably less than about 5% chemical precursors or other proteins or chemicals which are not identical to the protein of the invention. In preferred embodiments, isolated proteins or biologically active portions thereof lack contaminating proteins from the same organism from which the polypeptide of the present invention is derived. Typically, such proteins are produced by recombinant techniques.

[0921] A polypeptide of the invention comprises preferably an amino acid sequence which is sufficiently homologous to an amino acid sequence as depicted in column 5 or 7 of Table II or which comprises a consensus sequence or a polypeptide motif as depicted in column 7 of Table IV such that the protein or portion thereof maintains the ability to confer the activity of the present invention. Preferably, the polypeptide has an amino acid sequence identical as depicted in column 5 or 7 of Table II.

[0922] Further, the polypeptide of the invention or the polypeptide which activity is to be reduced in the process of the invention can have an amino acid sequence which is encoded by a nucleotide sequence which hybridizes, preferably hybridizes under stringent conditions as described above, to a nucleotide sequence of the nucleic acid molecule of the present invention.

[0923] Accordingly, the polypeptide has an amino acid sequence which is encoded by a nucleotide sequence that is at least about 35%, 40%, 45%, 50%, 55%, 60%, 65% or 70%, preferably at least about 75%, 80%, 85% or 90%, and more preferably at least about 91%, 92%, 93%, 94% or 95%, and even more preferably at least about 96%, 97%, 98%, 99% or more homologous to one of the nucleic acid molecules as depicted in column 5 or 7 of Table I. The preferred polypeptide possesses at least one of the activities according to the invention and described herein.

[0924] A preferred polypeptide complement the knock out, e.g. an inactivation or a reduction, repression or deletion of a polypeptide comprising a polypeptide as depicted in column 5 or 7 of Table II or comprising a consensus sequence or a polypeptide motif as depicted in column 7 of Table IV, when appropriately expressed in the knock out mutant. Appropriately expressed means in this context, that the polypeptide is produced in a similar quality and quantity and in a same developmental phase, tissue and compartment as the polypeptide inactivated, deleted or reduced in the knock out mutant. A preferred polypeptide of the present invention includes an amino acid sequence encoded by a nucleotide sequence which hybridizes, preferably hybridizes under stringent conditions, to a nucleotide sequence of column 5 or 7 of Table I or which is homologous thereto, as defined above.

[0925] Accordingly the polypeptide which activity is to be reduced in the process of the present invention, e.g. the polypeptide of the present invention can vary from the amino acid sequence of a polypeptide as depicted in column 5 or 7 of Table II or comprising a consensus sequence or a polypeptide motif as depicted in column 7 of Table IV in amino acid sequence due to natural variation or mutagenesis, as described in detail herein. Accordingly, the polypeptide comprise an amino acid sequence which is at least about 35%, 40%, 45%, 50%, 55%, 60%, 65% or 70%, preferably at least about 75%, 80%, 85% or 90%, and more preferably at least about 91%, 92%, 93%, mologous to an entire amino acid sequence of a polypeptide as depicted in column 5 or 7 of Table II or comprising a consensus sequence or a polypeptide motif as depicted in column 7 of Table IV.

[0926] For the comparison of amino acid sequences the same algorithms as described above or nucleic acid sequences can be used. Results of high quality are reached by using the algorithm of Needleman and Wunsch or Smith and Waterman. Therefore programs based on said algorithms are preferred. Advantageously the comparisons of sequences can be done with the program PileUp (J. Mol. Evolution, 25, 351-360, 1987, Higgins et al., CABIOS, 5 1989: 151-153) or preferably with the programs Gap and BestFit, which are respectively based on the algorithms of Needleman and Wunsch [J. Mol. Biol. 48; 443-453 (1970)] and Smith and Waterman [Adv. Appl. Math. 2; 482-489 (1981)]. Both programs are part of the GCG software-package [Genetics Computer Group, 575 Science Drive, Madison, Wis., USA 53711 (1991); Altschul et al. (1997) Nucleic Acids Res. 25:3389 et seq.]. Therefore preferably the calculations to determine the perentages of sequence homology are done with the program Gap over the whole range of the sequences. The following standard adjustments for the comparison of amino acid sequences were used: gap weight: 8, length weight: 2, average match: 2.912, average mismatch: -2.003.

[0927] Biologically active portions of a polypeptide include peptides comprising amino acid sequences derived from the amino acid sequence of the polypeptide disclosed herein, e.g., they comprise the amino acid sequence as depicted in the column 5 or 7 of Table II or the consensus sequence or the polypeptide motifs of column 7 of Table IV or the amino acid sequence of a protein homologous thereto, which include fewer amino acids than a full length protein having the activity of said protein, e.g. as disclosed or a full length protein which is homologous to a protein having the activity of the protein as disclosed or of a polypeptide to be reduced in the process of the present invention as depicted herein, and the repression, reduction or decrease of which lead to an increase of the tolerance and/or resistance to environmental stress and of the biomass production as compared to a corresponding non-transformed wild type plant.

[0928] Typically, biologically (or immunologically) active portions i.e. peptides, e.g., peptides which are, for example, 5, 10, 15, 20, 30, 35, 36, 37, 38, 39, 40, 50, 100 or more amino acids in length comprise a domain or motif with at least one activity or epitope of the polypeptide of the present invention. Moreover, other biologically active portions, in which other regions of the polypeptide are deleted, can be prepared by recombinant techniques and evaluated for one or more of the activities described herein.

[0929] Any mutagenesis strategies for the polypeptide usable in the process of the invention, in particular, of a polypeptide of the present invention, which result in an increase or in a decrease in the activity disclosed herein are not meant to be limiting; variations on these strategies will be readily apparent to one skilled in the art. Using such strategies, and incorporating the mechanisms disclosed herein, the nucleic acid molecule and polypeptide disclosed herein may be utilized to generate plants or parts thereof, expressing mutated nucleic acid molecule and/or polypeptide molecules still usable in the process of the invention. This desired compound may be any natural product of plants, which includes the final products of biosynthesis pathways and intermediates of naturally-occurring metabolic pathways, as well as molecules which do not naturally occur in the metabolism of said cells, but which are produced by a said cells of the invention.

[0930] The invention also provides chimeric or fusion proteins.

[0931] As used herein, a “chimeric protein” or “fusion protein” comprises a polypeptide operatively linked to a polypeptide which does not confer above-mentioned activity, in particular, which does confer an increase of the tolerance and/or resistance to environmental stress and of the biomass production as compared to a corresponding non-transformed wild type plant if its expression or activity is decreased.

[0932] In one embodiment, a protein (=“polypeptide”) is preferred which confers the increase of the tolerance and/or resistance to environmental stress and of the biomass production as compared to a corresponding non-transformed wild type plant, once its activity is decreased. Said protein refers preferably to a polypeptide having an amino acid sequence corresponding to the polypeptide as disclosed herein, preferably having an amino acid sequence corresponding to the polypeptides as depicted in column 5 or 7 of Table II or comprising a consensus sequence or a polypeptide motif as depicted in column 7 of Table IV, or a homologue thereof.

[0933] Within the fusion protein, the term “operatively linked” is intended to indicate that a polypeptide as disclosed herein and an other polypeptide or part thereof are fused to each other so that both sequences fulfil the proposed function addicted to the sequence used. The other polypeptide can be fused to the N-terminus or C-terminus of e.g. a polypeptide which activity is to be reduced in the process of the invention. For example, in one embodiment the fusion protein is a GST fusion protein in which the sequences of the polypeptide are fused to the C-terminus of the GST sequences. Such fusion proteins can facilitate the purification of recombinant polypeptides of the invention.

[0934] Preferably, a chimeric or fusion protein of the invention is produced by standard recombinant DNA techniques. For example, DNA fragments coding for the different polypeptide sequences are ligated together in-frame in accordance with conventional techniques, for example by employing blunt-ended or stagger-ended termini for ligation, restriction enzyme digestion to provide for appropriate termini, filling-in of cohesive ends as appropriate, alkaline phosphatase treatment to avoid undesirable joining, and enzymatic ligation. The fusion gene can be synthesized by conventional techniques including automated DNA synthesizers. Alternatively, PCR amplification of gene fragments can be carried out using anchor primers, which give rise to complementary overhangs between two consecutive gene fragments which can subsequently be annealed and reamplified to generate a chimeric gene sequence (see, for example, Current Protocols in Molecular Biology, eds. Ausubel et al. John Wiley & Sons: 1992). Moreover, many expression vectors are commercially available that already encode a fusion moiety (e.g., a GST polypeptide). The nucleic acid molecule can be cloned into such an expression vector such that the fusion moiety is linked in-frame to the encoded protein.

[0935] Furthermore, folding simulations and computer redesign of structural motifs of a protein to be reduced or repressed according to the process of the invention, e.g. of a polypeptide as disclosed herein, can be performed using appropriate computer programs (Olszewski, Proteins 25 (1996), 286-299; Hoffman, Comput. Appl. Biosci. 11 (1995), 675-679). Computer modeling of protein folding can be used for the conformational and energetic analysis of detailed peptide and protein models (Monge, J. Mol. Biol. 247 (1995), 995-1012; Renouf, Adv. Exp. Med. Biol. 376 (1995), 37-45). The appropriate programs can be used for the identification of interactive sites of a polypeptide and its substrates or binding factors or other interacting proteins by computer assistant searches for complementary peptide sequences (Fassina, Immunomethods (1994), 114-120). Further appropriate computer systems for the design of protein and peptides are described in the prior art, for example in Berry, Biochem. Soc. Trans. 22 (1994), 1033-1036; Wodak, Ann. N. Y. Acad. Sci. 501 (1987), 1-13; Pabo, Biochemistry 25 (1986), 5987-5991. The results obtained from the above-described computer analysis can be used for, e.g., the preparation of peptidomimetics of a protein or fragments thereof. Such pseudopeptide analogues of the, natural amino acid sequence of the protein may very efficiently mimic the parent protein (Benkirane, J. Biol. Chem. 271 (1996), 33218-33224). For example, incorporation of easily available achiral Q-amino acid residues into a protein or a fragment thereof results in the substitution of amide bonds by polymethylene units of an aliphatic chain, thereby providing a convenient strategy for constructing a peptidomimetic (Banerjee, Biopolymers 39 (1996), 769-777).

[0936] Superactive peptidomimetic analogues of small peptide hormones in other systems are described in the prior art (Zhang, Biochem. Biophys. Res. Commun. 224 (1996), 327-331). Appropriate peptidomimetics of a polypeptide can also be identified by the synthesis of peptidomimetic combinatorial libraries through successive amide alkylation and testing the resulting compounds, e.g., for their binding and immunological properties. Methods for the generation and use of peptidomimetic combinatorial libraries are described in the prior art, for example in Ostresh, Methods in Enzymology 267 (1996), 220-234 and Dorner, Bioorg. Med. Chem. 4 (1996), 709-715.

[0937] Furthermore, a three-dimensional and/or crystallographic structure of the protein can be used for the design of peptidomimetic inhibitors of the activity of a protein comprising a polypeptide as depicted in column 5 or 7 of Table II or comprising a consensus sequence or a polypeptide motif as depicted in column 7 of Table IV (Rose, Biochemistry 35 (1996), 12933-12944; Rutenber, Bioorg. Med. Chem. 4 (1996), 1545-1558).

[0938] Furthermore, a three-dimensional and/or crystallographic structure of a protein described herein and the identification of interactive sites and its substrates or binding factors can be used for design of mutants with modulated binding or turn over activities. For example, the active center of the polypeptide of the present invention can be modelled and amino acid residues participating in the catalytic reaction can be modulated to increase or decrease the binding of the substrate to inactivate the polypeptide. The identification of the active center and the amino acids involved in the catalytic reaction facilitates the screening for mutants having an increased or decreased activity.

[0939] One embodiment of the invention also relates to an antibody, which binds specifically to the polypeptide disclosed herein, i.e. specific fragments or epitopes of such a protein.

[0940] The term “epitope” relates to specific immunoreactive sites within an antigen, also known as antigenic determinates. These epitopes can be a linear array of monomers in a polymeric composition—such as amino acids in a protein—or consist of or comprise a more complex secondary or tertiary structure. Those of skill will recognize that immunogens (i.e., substances capable of eliciting an immune response) are antigens; however, some antigen, such as haptens, are not immunogens but may be made immunogenic by coupling to a carrier molecule. The term “antigen” includes references to a substance to which an antibody can be generated and/or to which the antibody is specifically immunoreactive.

[0941] The antibody preferably confers the reduction, repression or deletion of a protein comprising a polypeptide as depicted in column 5 or 7 of Table II, preferably as depicted in Table IIB, or comprising a consensus sequence or a polypeptide motif as depicted in column 7 of Table of Table IV, or a homologue thereof as described herein, e.g. the antibody inactivates the protein of the invention due to its binding in the organism or a part thereof.

[0942] The antibodies of the invention can also be used to identify and isolate a target polypeptide which activity has to be reduces according to the invention. Such antibodies can also be expressed in the suitable host organisms thereby reducing the activity of a gene product disclosed herein, e.g. the polynucleotide or polypeptide disclosed herein, e.g. of a nucleic acid molecule comprising a nucleic acid molecule shown in column 5 or 7 of Table I, e.g. the polypeptide comprising the polypeptide as depicted in column 5 or 7 of Table II, by binding to the expression product leading for example to a steric interferance with their activity.

[0943] These antibodies can be monoclonal antibodies, polyclonal antibodies or synthetic antibodies as well as fragments of antibodies, such as Fab, Fv or scFv fragments etc. Monoclonal antibodies can be prepared, for example, by the techniques as originally described in Köhler and Milstein, Nature 256 (1975), 495, and Galfr6, Meth. Enzymol. 73 (1981), 3, which comprise the fusion of mouse myeloma cells to spleen cells derived from immunized mammals.

[0944] Furthermore, antibodies or fragments thereof to the aforementioned peptides can be obtained by using methods, which are described, e.g., in Harlow and Lane “Antibodies, A Laboratory Manual”, CSH Press, Cold Spring Harbor, 1988. These antibodies can be used, for example, for the immunoprecipitation and immuno-localization of proteins according to the invention as well as for the monitoring of the synthesis of such proteins, for example, in recombinant organisms, and for the identification of compounds interacting with the protein according to the invention. For example, surface plasmon resonance as employed in the BlAcore system can be used to increase the efficiency of phage antibodies selections, yielding a high increment of affinity from a single library of phage antibodies, which bind to an epitope of the protein of the invention (Schier, Human Antibodies Hybridomas 7 (1996), 97-105; Malmborg, J. Immunol. Methods 183 (1995), 7-13). In many cases, the binding phenomena of antibodies to antigens is equivalent to other ligand/anti-ligand binding.

[0945] A further embodiment of the invention also relates to a method for the generation of a transgenic plant cell or a transgenic plant tissue or a transgenic plant, which comprises introducing, into the plant, the plant cell or the plant tissue, the nucleic acid construct according to the invention, the vector according to the invention, or the nucleic acid molecule according to the invention.

[0946] A further embodiment of the invention also relates to a method for the transient generation of a transgenic plant cell or a transgenic plant tissue or a transgenic plant, which comprises introducing, into the plant, the plant cell or the plant tissue, the nucleic acid construct according to the invention, the vector according to the invention, the nucleic acid molecule characterized herein as being contained in the nucleic acid construct of the invention or the nucleic acid molecule used in the process according to the invention, whereby the introduced nucleic acid molecules, nucleic acid construct and/or vector is not integrated into the genome of the host or host cell. Therefore the transformants are not stable during the propagation of the host in respect of the introduced nucleic acid molecules, nucleic acid construct and/or vector.

[0947] In the process according to the invention, transgenic organisms are also to be understood as meaning—if they take the form of plants—plant cells, plant tissues, plant organs such as root, shoot, stem, seed, flower, tuber or leaf, or intact plants which are grown.

[0948] “Growing” is to be understood as meaning for example culturing the transgenic plant cells, plant tissue or plant organs on or in a nutrient medium or the intact plant on or in a substrate, for example in hydroponic culture, potting compost or on a field soil.

[0949] In a further advantageous embodiment of the process, the nucleic acid molecules can be expressed in plant cells from higher plants (for example spermatophytes such as crops). Examples of plant expression vectors encompass those which are described in detail herein or in: Becker, D. [(1992) Plant Mol. Biol. 20:1195-1197] and Bevan, M.W. [(1984), Nucl. Acids Res. 12:8711-8721; Vectors for Gene Transfer in Higher Plants; in: Transgenic Plants, Vol. 1, Engineering and Utilization, Ed.: Kung and R. Wu, Academic Press, 1993, pp. 15-38]. An overview of binary vectors and their use is also found in Hellens, R. [(2000), Trends in Plant Science, Vol. 5 No.10, 446-451.

[0950] Vector DNA can be introduced into cells via conventional transformation or transfection techniques. The terms “transformation” and “transfection” include conjugation and transduction and, as used in the present context, are intended to encompass a multiplicity of prior-art methods for introducing foreign nucleic acid molecules (for example DNA) into a host cell, including calcium phosphate coprecipitation or calcium chloride coprecipitation, DEAE-dextran-mediated transfection, PEG-mediated transfection, lipofection, natural competence, chemically mediated transfer, electroporation or particle bombardment. Suitable methods for the transformation or transfection of host cells, including plant cells, can be found in Sambrook et al. (Molecular Cloning: A Laboratory Manual., 2^{nd} Ed., Cold Spring Harbor Laboratory, Cold Spring Harbor Laboratory Press, Cold Spring Harbor, N.Y., 1989) and in other laboratory handbooks such as Methods in Molecular Biology, 1995, Vol. 44, Agrobacterium protocols, Ed.: Gartland and Davey, Humana Press, Totowa, N.J.

[0951] The above-described methods for the transformation and regeneration of plants from plant tissues or plant cells are exploited for transient or stable transformation of plants. Suitable methods are the transformation of protoplasts by polyethylene-glycol-induced DNA uptake, the biolistic method with the gene gun—known as the particle bombardment method-, electroporation, the incubation of dry embryos in DNA-containing solution, microinjection and the Agrobacterium-mediated gene transfer. The abovementioned methods are described for example in B. Jenes, Techniques for Gene Transfer, in: Transgenic Plants, Vol. 1, Engineering and Utilization, edited by S. D. Kung and R. Wu, Academic Press (1993) 128-143 and in Potrykus Annu. Rev. Plant Physiol. Plant Molec. Biol. 42 (1991) 205-225. The construct to be expressed is preferably cloned into a vector, which is suitable for transforming Agrobacterium tumefaciens, for example pBin19 (Bevan, Nucl. Acids Res. 12 (1984) 8711). Agrobacteria transformed with such a vector can then be used in the known manner for the transformation of plants, in particular crop plants, such as, for example, tobacco plants, for example by bathing scarified leaves or leaf segments in an agrobacterial solution and subsequently culturing them in suitable media. The transformation of plants with Agrobacterium tumefaciens is described for example by Hofgen and Willmitzer in Nucl. Acid Res. (1988) 16, 9877 or known from, inter alia, F. F. White, Vectors for Gene Transfer in Higher Plants; in Transgenic Plants, Vol. 1, Engineering and Utilization, edited by S. D. Kung and R. Wu, Academic Press, 1993, pp. 15-38.

[0952] To select for the successful transfer of a nucleic acid molecule, vector or nucleic acid construct into a host organism, it is advantageous to use marker genes as have already been described above in detail. It is known of the stable or transient integration of nucleic acids into plant cells that only a minority of the cells takes up the foreign DNA and, if desired, integrates it into its genome, depending on the expression vector used and the transfection technique used. To identify and select these integrants, a gene encoding for a selectable marker (as described above, for example resistance to antibiotics) is usually introduced into the host cells together with the gene of interest. Preferred selectable markers in plants comprise those, which confer resistance to an herbicide such as glyphosate or gluphosinate. Other suitable markers are, for example, markers, which encode genes involved in biosynthetic pathways of, for example, sugars or amino acids, such as β-galactosidase, ura3 or ilv2. Markers, which encode genes such as luciferase, gfp or other fluorescence genes, are likewise suitable. These markers and the aforementioned markers can be used in mutants in whom these genes are not functional since, for example, they have been deleted by conventional methods. Furthermore, nucleic acid molecules, which encode a selectable marker, can be introduced into a host cell on the same vector as those, which encode the nucleotide acid molecule used in the process or else in a separate vector. Cells which have been transfected stably with the nucleic acid molecule introduced can be identified for example by selection (for example, cells which have integrated the selectable marker survive whereas the other cells die).

[0953] Since the marker genes, as a rule specifically the gene for resistance to antibiotics and herbicides, are no longer required or are undesired in the transgenic host cell once the nucleic acids have been introduced successfully, the process according to the invention for introducing the nucleic acids advantageously employs techniques which enable the removal, or excision, of these marker genes. One such a method is what is known as cotransformation. The cotransformation method employs two vectors simultaneously for the transformation, one vector bearing the nucleic acid or nucleic acid construct according to the invention and a second bearing the marker gene(s). A large proportion of transformants receives or, in the case of plants, comprises (up to 40% of the transformants and above), both vectors. The marker genes can subsequently be removed from the transformed plant by performing crosses. In an preferred embodiment, a conditional marker allowing both positive and negative selection is used, in order to first identify the transformation event by the positive selection and later on allowing for the identification of lines which have lost the marker through crossing or segregation by negative selection. Markers which confer resistance against D-amino acids are such preferred conditional markers (Erikson et al., 2004, Nature Biotech 22(4), 455-458). In another method, marker genes integrated into a transposon are used for the transformation together with desired nucleic acid (known as the Ac/Ds technology). In some cases (approx. 10%), the transposon jumps out of the genome of the host cell once transformation has taken place successfully and is lost. In a further number of cases, the transposon jumps to a different location. In these cases, the marker gene must be eliminated by performing crosses. In microbiology, techniques were developed which make possible, or facilitate, the detection of such events. A further advantageous method relies on what are known as recombination systems, whose advantage is that elimination by crossing can be dispensed with. The best-known system of this type is what is known as the Cre/lox system. Crel is a recombinase, which removes the sequences located between the loxP sequence. If the marker gene is integrated between the loxP sequence, it is removed, once transformation has taken place successfully, by expression of the recombinase. Further recombination systems are the HIN/HIX, FLP/FRT and REP/STB system (Tribble et al., J. Biol. Chem., 275, 2000: 22255-22267; Velmurugan et al., J. Cell Biol., 149, 2000: 553-566). A site-specific integration into the plant genome of the nucleic acid sequences according to the invention is possible. Naturally, these methods can also be applied to microorganisms such as yeast, fungi or bacteria.

[0954] Agrobacteria transformed with an expression vector according to the invention may also be used in the manner known per se for the transformation of plants such as experimental plants like Arabidopsis or crop plants, such as, for example, cereals, maize, oats, rye, barley, wheat, soya, rice, cotton, sugarbeet, canola, sunflower, flax, hemp, potato, tobacco, tomato, carrot, bell peppers, oilseed rape, tapioca, cassava, arrow root, tagetes, alfalfa, lettuce and the various tree, nut, cotton and grapevine species, in particular oil-containing crop plants such as soya, peanut, castor-oil plant, sunflower, maize, cotton, flax, oilseed rape, coconut, oil palm, safflower (Carthamus tinctorius) or cocoa beans, for example by bathing scarified leaves or leaf segments in an agrobacterial solution and subsequently growing them in suitable media.

[0955] In addition to the transformation of somatic cells, which then has to be regenerated into intact plants, it is also possible to transform the cells of plant meristems and in particular those cells which develop into gametes. In this case, the transformed gametes follow the natural plant development, giving rise to transgenic plants. Thus, for example, seeds of Arabidopsis are treated with agrobacteria and seeds are obtained from the developing plants of which a certain proportion is transformed and thus transgenic (Feldman, K A and Marks M D (1987). Mol Gen Genet 208:274-289; Feldmann K (1992). In: C Koncz, N-H Chua and J Shell, eds, Methods in Arabidopsis Research. Word Scientific, Singapore, pp. 274-289). Alternative methods are based on the repeated removal of the influorescences and incubation of the excision site in the center of the rosette with transformed agrobacteria, whereby transformed seeds can likewise be obtained at a later point in time (Chang (1994). Plant J. 5: 551-558; Katavic (1994) Mol Gen Genet, 245: 363-370). However, an especially effective method is the vacuum infiltration method with its modifications such as the “floral dip” method. In the case of vacuum infiltration of Arabidopsis, intact plants under reduced pressure are treated with an agrobacterial suspension (Bechthold, N (1993). C R Acad Sci Paris Life Sci, 316: 1194-1199), while in the case of the“floral dip” method the developing floral tissue is incubated briefly with a surfactant-treated agrobacterial suspension (Clough, S J and Bent, A F (1998). The Plant J. 16, 735-743). A certain proportion of transgenic seeds are harvested in both cases, and these seeds can be distinguished from nontransgenic seeds by growing under the above-described selective conditions.

[0956] The genetically modified plant cells can be regenerated via all methods with which the skilled worker is familiar. Suitable methods can be found in the abovementioned publications by S. D. Kung and R. Wu, Potrykus or Hofgen and Willmitzer.

[0957] Accordingly, the present invention thus also relates to a plant cell comprising the nucleic acid construct according to the invention, the nucleic acid molecule according to the invention or the vector according to the invention. Accordingly, the present invention thus also relates to a plant cell produced according to the abovementioned process to produce a plant cell.

[0958] Accordingly the present invention relates to any cell, in particular to a plant cell, plant tissue or plant or its progeny, which is transgenic for any nucleic acid molecule or construct disclosed herein, e.g. the nucleic acid molecule's repression or reduction or its gene product activity repression or reduction confers the increased tolerance and/or resistance to environmental stress and increased biomass production as compared to a corresponding non-transformed wild type plant.

[0959] Accordingly the present invention relates to any cell transgenic for any nucleic acid molecule comprising the nucleic acid molecule or part of it, which activity is to be reduced or encoding the polypeptide which acitivity is to be reduced in the process of the invention, e.g. the nucleic acid molecule of the invention, the nucleic acid construct of the invention, the antisense molecule of the invention, the vector of the invention or a nucleic acid molecule encoding the polypeptide of the invention, e.g. encoding a polypeptide having activity of the protein of the invention.

[0960] Accordingly the present invention relates to any cell transgenic for the the vector, the host cell, the polypeptide, or the antisense, RNAi, snRNA, dsRNA, siR-NA, miRNA, ta-siRNA, cosuppression construct, recombination construct or ribozyme molecule, or the viral nucleic acid molecule, the antibody of the invention, e.g. for the vector, the host cell, the polypeptide, or the antisense, RNAi, snRNA, dsRNA, siRNA, miRNA, ta-siRNA, cosuppression construct, recombination construct or ribozyme molecule, or the viral nucleic acid molecule comprising a fragment of the nucleic acid molecule disclosed herein, the antibody binding to a epitope of the polypeptide disclosed herein.

[0961] A naturally occurring expression cassette—for example the naturally occurring combination of the promoter of the protein with the corresponding gene, which codes for the protein of interest—becomes a transgenic expression cassette when it is modified by non-natural, synthetic “artificial” methods such as, for example, mutagenization. Such methods have been described (U.S. Pat. No. 5,565,350; WO 00/15815; also see above).

[0962] Further, the plant cell, plant tissue or plant can also be transformed such that further enzymes and proteins are (over)expressed or repressed or reduced for supporting an increased tolerance and/or resistance to environmental stress and increased biomass production as compared to a corresponding non-transformed wild type plant.

[0963] With regard to any nucleic acid sequence a nucleic acid construct which contains said nucleic acid sequence or an organism (=transgenic organism) which is transformed with said nucleic acid sequence or said nucleic acid construct, “transgene” means all those constructs which have been brought about by genetic manipulation methods and in which either
[0964] a) said nucleic acid sequence or a derivative thereof, or
[0965] b) a genetic regulatory element, for example a promoter, which is functionally linked to said nucleic acid sequence or a derivative thereof, or
[0966] c) (a) and (b)
   is/are not present in its/their natural genetic environment or has/have been modified by means of genetic manipulation methods, it being possible for the modification to be, by way of example, a substitution, addition, deletion, inversion or insertion of one or more nucleotides or nucleotide radicals.

[0967] “Natural genetic environment” means the natural chromosomal locus in the organism of origin or the presence in a genomic library. In the case of a genomic library, the natural, genetic environment of the nucleic acid sequence is preferably at least partially still preserved. The environment flanks the nucleic acid sequence at least on one side and has a sequence length of at least 50 bp, preferably at least 500 bp, particularly preferably at least 1000 bp, very particularly preferably at least 5000 bp.

[0968] However, transgenic also means that the nucleic acids according to the invention are located at their natural position in the genome of an organism, but that the sequence has been modified in comparison with the natural sequence and/or that the regulatory sequences of the natural sequences have been modified. Preferably, transgenic/recombinant is to be understood as meaning the expression of the nucleic acids used in the process according to the invention in a non-natural position in the genome, that is to say the expression of the nucleic acids is homologous or, preferably, heterologous. This expression can be transiently or of a sequence integrated stably into the genome.

[0969] The use of the nucleic acid sequence described herein in the process of the invention or of the nucleic acid construct or another embodiment according to this invention for the generation of transgenic plants is therefore also subject matter of the invention.

[0970] The term “transgenic plants” used in accordance with the invention refers to the progeny of a transgenic plant, for example the T₁, T₂, T₃ and subsequent plant generations or the BC₁, BC₂, BC₃ and subsequent plant generations. Thus, the transgenic plants according to the invention can be raised and selfed or crossed with other individuals in order to obtain further transgenic plants according to the invention. Transgenic plants may also be obtained by propagating transgenic plant cells vegetatively. The present invention also relates to transgenic plant material, which can be derived from a transgenic plant population according to the invention. Such material includes plant cells and certain tissues, organs and parts of plants in all their manifestations, such as seeds, leaves, anthers, fibers, tubers, roots, root hairs, stems, embryo, calli, cotelydons, petioles, harvested material, plant tissue, reproductive tissue and cell cultures, which are derived from the actual transgenic plant and/or can be used for bringing about the transgenic plant.

[0971] Any transformed plant obtained according to the invention can be used in a conventional breeding scheme or in in vitro plant propagation to produce more transformed plants with the same characteristics and/or can be used to introduce the same characteristic in other varieties of the same or related species. Such plants are also part of the invention. Seeds obtained from the transformed plants genetically also contain the same characteristic and are part of the invention. As mentioned before, the present invention is in principle applicable to any plant and crop that can be transformed with any of the transformation method known to those skilled in the art. In a specific embodiment the nucleic acid or the polypeptide which activity is reduced according to the process of the invention is mutated or otherwise reduced in its activity in a transformable crop variety. The genes or mutated version of the nucleic acid or the polypeptide conferring the reduction are later on transferred to a elite (commercial relevant) crop variety by for example (marker assisted) crossing, whereby the mutated or otherwise reduced version of the nucleic acid or polypeptide of the invention replace or repress the original or native and active one.

[0972] In an especially preferred embodiment, the organism, the host cell, plant cell, plant or plant tissue according to the invention is transgenic.

[0973] Accordingly, the invention therefore relates to transgenic organisms transformed with at least one nucleic acid molecule disclosed herein, e.g. the antisense, RNAi, snRNA, dsRNA, siRNA, miRNA, ta-siRNA, cosuppression construct, recombination construct or ribozyme molecule, or the viral nucleic acid molecule, nucleic acid construct or vector according to the invention, and to cells, cell cultures, tissues, parts—such as, for example, in the case of plant organisms, plant tissue, for example leaves, roots and the like—or propagation material derived from such organisms, or intact plants.

[0974] Accordingly, the present invention also relates to cells, cell cultures, tissues, parts—such as, for example, in the case of plant organisms, plant tissue, for example leaves, roots and the like—or propagation material derived from such organisms, or intact plants with an increased tolerance and/or resistance to environmental stress and increased biomass production as compared to a corresponding non-transformed wild type plant.

[0975] In particular the present invention also relates to cells, cell cultures, tissues, parts—such as, for example, in the case of plant organisms, plant tissue, for example leaves, roots and the like—or propagation material derived from such organisms, or intact plants which have reduced or deleted activity selected from the group consisting of: 1-phosphatidylinositol 4-kinase, amino acid permease (AAP1), At3g55990-protein, At5g40590-protein, ATP-dependent peptidase/ ATPase/nucleoside-triphosphatase/serine-type endopeptidase, DC1 domain-containing protein/protein-binding protein/zinc ion binding protein, DNA binding protein/transcription factor, hydro-lyase/aconitate hydratase, metalloexopeptidase (MAP1 C), methyltransferase, nitrate transporter (ATNRT2.3), nitrate/chlorate transporter (NRT1.1), pectate lyase protein/powdery mildew susceptibility protein (PMR6), peptidase/ubiquitin-protein ligase/zinc ion binding protein (JR700), proton-dependent oligopeptide transport protein, transcription factor, and/or ubiquitin conjugating enzyme/ubiquitin-like activating enzyme.

[0976] Further, the present invention also relates to cells, cell cultures, tissues, parts—such as, for example, in the case of plant organisms, plant tissue, for example leaves, roots and the like—or propagation material derived from such organisms, or intact plants comprising a reduced activity or expression of a nucleic acid molecule or polypeptide to be reduced according to the process of the invention.

[0977] Accordingly, the present invention in particular relates to cells, cell cultures, tissues, parts—such as, for example, in the case of plant organisms, plant tissue, for example leaves, roots and the like—or propagation material derived from such organisms, or intact plants comprising a reduced activity or expression of nucleic acid molecule comprising a nucleic acid molecule as depicted in column 5 or 7 of Table IA or B or comprising a reduced activity or expression of a polypeptide comprising a polypeptide as depicted in column 5 or 7 of Table IIA or B or comprising a consensus sequence or a polypeptide motif as depicted in column 7 of Table IV.

[0978] The terms “recombinant (host)” and “transgenic (host)”are used interchangeably in this context. Naturally, these terms refer not only to the host organism or target cell in question, but also to the progeny, or potential progeny, of these organisms or cells. Since certain modifications may occur in subsequent generations owing to mutation or environmental effects, such progeny is not necessarily identical with the parental cell, but still comes within the scope of the term as used herein.

[0979] Suitable organisms for the process according to the invention or as hosts are those as disclosed above. The organisms used as hosts are microorganisms, such as bacteria, fungi, yeasts or algae or plants, such as dicotyledonous or monocotyledonous plants.

[0980] In principle all plants can be used as host organism, especially the plants mentioned above as source organism. Preferred transgenic plants are, for example, selected from the families Aceraceae, Anacardiaceae, Apiaceae, Asteraceae, Brassicaceae, Cactaceae, Cucurbitaceae, Euphorbiaceae, Fabaceae, Malvaceae, Nymphaeaceae, Papaveraceae, Rosaceae, Salicaceae, Solanaceae, Arecaceae, Bromeliaceae, Cyperaceae, lridaceae, Liliaceae, Orchidaceae, Gentianaceae, Labiaceae, Magnoliaceae, Ranunculaceae, Carifolaceae, Rubiaceae, Scrophulariaceae, Caryophyllaceae, Ericaceae, Polygonaceae, Violaceae, Juncaceae or Poaceae and preferably from a plant selected from the group of the families Apiaceae, Asteraceae, Brassicaceae, Cucurbitaceae, Fabaceae, Papaveraceae, Rosaceae, Solanaceae, Liliaceae or Poaceae. Preferred are crop plants such as plants advantageously selected from the group of the genus peanut, oilseed rape, canola, sunflower, safflower, olive, sesame, hazelnut, almond, avocado, bay, pumpkin/squash, linseed, soya, pistachio, borage, maize, wheat, rye, oats, sorghum and millet, triticale, rice, barley, cassava, potato, sugarbeet, egg plant, alfalfa, and perennial grasses and forage plants, oil palm, vegetables (brassicas, root vegetables, tuber vegetables, pod vegetables, fruiting vegetables, onion vegetables, leafy vegetables and stem vegetables), buckwheat, Jerusalem artichoke, broad bean, vetches, lentil, dwarf bean, lupin, clover and Lucerne for mentioning only some of them.

[0981] Preferred plant cells, plant organs, plant tissues or parts of plants originate from the under source organism mentioned plant families, preferably from the abovementioned plant genus, more preferred from abovementioned plants spezies.

[0982] In one embodiment of the invention plant cells, plant organs, plant tissues or parts of plants are selected from the group comprising corn, soy, oil seed rape (including canola and winter oil seed reap), cotton, wheat and rice.

[0983] Yet another embodiment of the invention is a composition comprising the protein of the invention, the nucleic acid molecule of the invention, the polypeptide of the invention, the nucleic acid construct or the vector of the invention, the antagonist of the invention, the antibody of the invention and optionally a agricultural acceptable carrier.

[0984] In yet another aspect, the invention also relates to harvestable parts and to propagation material of the transgenic plants according to the invention which either contain transgenic plant cells expressing a nucleic acid molecule according to the invention or which contains cells which show a reduced, repressed, decreased or deleted cellular activity selected from the group consisting of: 1-phosphatidylinositol 4-kinase, amino acid permease (AAP1), At3g55990-protein, At5g40590-protein, ATP-dependent peptidase/ATPase/nucleoside- triphosphatase/serine-type endopeptidase, DC1 domain-containing protein/protein-binding protein/zinc ion binding protein, DNA binding protein/transcription factor, hydro-lyase/aconitate hydratase, metalloexopeptidase (MAP1C), methyltransferase, nitrate transporter (ATNRT2.3), nitrate/chlorate transporter (NRT1.1), pectate lyase protein/powdery mildew susceptibility protein (PMR6), peptidase/ubiquitin-protein ligase/zinc ion binding protein (JR700), proton-dependent oligopeptide transport protein, transcription factor, and/or ubiquitin conjugating enzyme/ubiquitin-like activating enzyme, e.g. which show a reduced, repressed, decreased or deleted activity of the polypeptide or the nucleic acid molecule to be reduced in the process of the invention, in particular a reduced or deleted activity of a polypeptide comprising a polypeptide as depicted in column 5 or 7 of Table II, preferably as depicted in Table IIB, or comprising a consensus sequence or a polypeptide motif as depicted in column 7 of Table IV, or of a gene product of a nucleic acid molecule comprising the polynucleotide as depicted in column 5 or 7 of Table I, preferably as depicted in Table IB.

[0985] Harvestable parts can be in principle any useful parts of a plant, for example, flowers, pollen, seedlings, tubers, leaves, stems, fruit, seeds, roots etc. Propagation material includes, for example, seeds, fruits, cuttings, seedlings, tubers, rootstocks etc. Preferred are seeds, seedlings, tubers or fruits as harvestable or propagation material.

[0986] In one embodiment, the present invention relates to a method for the identification of a gene product conferring an increased tolerance and/or resistance to environmental stress and increased biomass production as compared to a corresponding non-transformed wild type plant, comprising the following steps:
[0987] a) contacting, e.g. hybridising, the one, some or all nucleic acid molecules of a sample, e.g. cells, tissues, plants or microorganisms or a nucleic acid library , which can contain a candidate gene encoding a gene product conferring an increased tolerance and/or resistance to environmental stress and increased biomass production as compared to a corresponding non-transformed wild type plant after reduction or deletion of its expression, with a nucleic acid molecule as depicted in column 5 or 7 of Table IA or B or a functional homologue thereof;
[0988] b) identifying the nucleic acid molecules, which hybridize under relaxed stringent conditions with said nucleic acid molecule, in particular to the nucleic acid molecule sequence as depicted in column 5 or 7 of Table I and, optionally, isolating the full length cDNA clone or complete genomic clone;
[0989] c) identifying the candidate nucleic acid molecules or a fragment thereof in host cells, preferably in a plant cell
[0990] d) reducing or deletion the expressing of the identified nucleic acid molecules in the host cells;
[0991] e) assaying the level of tolerance and/or resistance to environmental stress and biomass production as compared to a corresponding non-transformed wild type plant in the host cells; and
[0992] f) identifying the nucleic acid molecule and its gene product which reduction or deletion of expression confers an increased tolerance and/or resistance to environmental stress and increased biomass production as compared to a corresponding non-transformed wild type plant in the host cell after expression compared to the wild type.

[0993] Relaxed hybridisation conditions are: After standard hybridisation procedures washing steps can be performed at low to medium stringency conditions usually with washing conditions of 40° -55° C. and salt conditions between 2×SSC and 0,2×SSC with 0,1% SDS in comparison to stringent washing conditions as e.g. 60° to 68° C. with 0.1% SDS. Further examples can be found in the references listed above for the stringend hybridization conditions. Usually washing steps are repeated with increasing stringency and length until a useful signal to noise ratio is detected and depend on many factors as the target, e.g. its purity, GC-content, size etc, the probe, e.g.its length, is it a RNA or a DNA probe, salt conditions, washing or hybridisation temperature, washing or hybridisation time etc.

[0994] In another embodiment, the present invention relates to a method for the identification of a gene product the reduction of which confers an increased tolerance and/or resistance to environmental stress and increased biomass production as compared to a corresponding non-transformed wild type plant, comprising the following steps:
[0995] a) identifiying a nucleic acid molecule in an organism, which is at least 20%, preferably 25%, more preferably 30%, even more preferred are 35%. 40% or 50%, even more preferred are 60%, 70% or 80%, most preferred are 90% or 95% or more homolog to the nucleic acid molecule encoding a protein comprising the polypeptide molecule as depicted in column 5 or 7 of Table II or comprising a consensus sequence or a polypeptide motif as depicted in column 7 of Table IV or being encoded by a nucleic acid molecule comprising a polynucleotide as depicted in column 5 or 7 of Table I or a homologue thereof as described herein , for example via homology search in a data bank;
[0996] b) repressing, reducing or deleting the expression of the identified nucleic acid molecules in the host cells;
[0997] c) assaying the level of tolerance and/or resistance to environmental stress and biomass production as compared to a corresponding non-transformed wild type plant; and
[0998] d) identifying the host cell, in which the repressing, reducing or deleting of the nucleic acid molecule or its gene product confers an increased tolerance and/or resistance to environmental stress and increased biomass production as compared to a corresponding non-transformed wild type plant.

[0999] In another embodiment, the present invention relates to a method for the identification of a gene product the reduction of which confers an increased tolerance and/or resistance to environmental stress and increased biomass production as compared to a corresponding non-transformed wild type plant, comprising the following steps:
[1000] a) providing an organism or host cells according to the invention, in which an nucleic acid molecule encoding a protein comprising the polypeptide has been inactivated, deleted or otherwise reduced in its activity;
[1001] b) transforming the organism with an cDNA expression or an genomic library or any other nucleic acid library capable of efficiently expressing the encompassed nucleic acid sequence
[1002] c) assaying the level of tolerance and/or resistance to environmental stress and biomass production as compared to a corresponding non-transformed wild type plant; and
[1003] d) identifying the host cell, in which the introduced nucleic acid sequence reverses the increased tolerance and/or resistance to environmental stress and increased biomass production as compared to a corresponding non-transformed wild type plant, reestablishing the wild type situation.

[1004] In one embodiment the different methods for the identification of a gene product the reduction of which confers an increased tolerance and/or resistance to environmental stress and increased biomass production as compared to a corresponding non-transformed wild type plant can be combined in any combination in order to optimize the method.

[1005] Furthermore, in one embodiment, the present invention relates to a method for the identification of a compound stimulating the increased tolerance and/or resistance to environmental stress and increased biomass production as compared to a corresponding non-transformed wild type plant to said plant comprising:
[1006] a) contacting cells which express the polypeptide as depicted in column 5 or 7 of Table II or being ecoded by a nucleic acid molecule comprising a polynucleotide as depicted in column 5 or 7 of Table I or a homologue thereof as described herein or its mRNA with a candidate compound under cell cultivation conditions;
[1007] b) assaying a reduction, decrease or deletion in expression of said polypeptide or said mRNA;
[1008] c) comparing the expression level to a standard response made in the absence of said candidate compound; whereby, a reduced, decreased or deleted expression over the standard indicates that the compound is stimulating the increased tolerance and/or resistance to environmental stress and increased biomass production as compared to a corresponding non-transformed wild type plant.

[1009] Furthermore, in one embodiment, the present invention relates to a method for the screening for antagonists of the activity of the polypeptide as depicted in column 5 or 7 of Table II or being ecoded by a nucleic acid molecule comprising a polynucleotide as depicted in column 5 or 7 of Table I or a homologue thereof as described herein, e.g. a polypeptide conferring an increased tolerance and/or resistance to environmental stress and increased biomass production as compared to a corresponding non-transformed wild type plant after decreasing its cellular activity, e.g. of the activity of a polypeptide having the activity represented by the protein or nucleic acid molecule to be reduced in the process of the invention or of the polypeptide of the invention comprising:
[1010] a) contacting cells, tissues, plants or microorganisms which express the polypeptide according to the invention with a candidate compound or a sample comprising a plurality of compounds under conditions which permit the expression the poly-peptide of the present invention;
[1011] b) assaying the tolerance and/or resistance to environmental stress and biomass production level or the polypeptide expression level in the cell, tissue, plant or microorganism or the media the cell, tissue, plant or microorganisms is cultured or maintained in; and
[1012] c) identifying an antagonist by comparing the measured tolerance and/or resistance to environmental stress and biomass production level or polypeptide expression level with a standard tolerance and/or resistance to environmental stress and biomass production level or polypeptide expression level measured in the absence of said candidate compound or a sample comprising said plurality of compounds, whereby an increased level of the tolerance and/or resistance to environmental stress and biomass production over the standard indicates that the compound or the sample comprising said plurality of compounds is an antagonist.

[1013] Yet another embodiment of the invention relates to a process for the identification of a compound conferring increased tolerance and/or resistance to environmental stress and increased biomass production as compared to a corresponding non-transformed wild type plant in a plant; comprising the following step:
[1014] a) culturing or maintaining a plant or animal cell or their tissues or microorganism expressing a polypeptide as depicted in column 5 or 7 of Table II or being encoded by a nucleic acid molecule comprising a polynucleotide as depicted in column 5 or 7 of Table I or a homologue thereof as described herein or a polynucleotide encoding said polypeptide and providing a readout system capable of interacting with the polypeptide under suitable conditions which permit the interaction of the polypeptide with this readout system in the presence of a chemical compound or a sample comprising a plurality of chemical compounds and capable of providing a detectable signal in response to the binding of a chemical compound to said polypeptide under conditions which permit the depression of said readout system and of the protein as depicted in column 5 or 7 of Table II or being ecoded by a nucleic acid molecule comprising a polynucleotide as depicted in column 5 or 7 of Table I or a homologue thereof as described herein; and
[1015] b) identifying if the chemical compound is an effective antagonist by detecting the presence or absence or decrease or increase of a signal produced by said readout system.

[1016] Said compound may be chemically synthesized or microbiologically produced and/or comprised in, for example, samples, e.g., cell extracts from, e.g., plants, animals or microorganisms, e.g. pathogens. Furthermore, said compound(s) may be known in the art but hitherto not known to be capable of suppressing the poly-peptide of the present invention. The reaction mixture may be a cell free extract or may comprise a cell or tissue culture. Suitable set ups for the process for identification of a compound of the invention are known to the person skilled in the art and are, for example, generally described in Alberts et al., Molecular Biology of the Cell, third edition (1994), in particular Chapter 17. The compounds may be, e.g., added to the reaction mixture, culture medium, injected into the cell or sprayed onto the plant.

[1017] If a sample containing a compound is identified in the process, then it is either possible to isolate the compound from the original sample identified as containing the compound capable of increasing tolerance and/or resistance to environmental stress and the biomass production as compared to a corresponding non-transformed wild type plant, or one can further subdivide the original sample, for example, if it consists of a plurality of different compounds, so as to reduce the number of different substances per sample and repeat the method with the subdivisions of the original sample. Depending on the complexity of the samples, the steps described above can be performed several times, preferably until the sample identified according to the said process only comprises a limited number of or only one substance(s). Preferably said sample comprises substances of similar chemical and/or physical properties, and most preferably said substances are identical. Preferably, the compound identified according to the described method above or its derivative is further formulated in a form suitable for the application in plant breeding or plant cell and tissue culture.

[1018] The compounds which can be tested and identified according to said process may be expression libraries, e.g., cDNA expression libraries, peptides, proteins, nucleic acids, antibodies, small organic compounds, hormones, peptidomimetics, PNAs or the like (Milner, Nature Medicine 1 (1995), 879-880; Hupp, Cell 83 (1995), 237-245; Gibbs, Cell 79 (1994), 193-198 and references cited supra). Said compounds can also be functional derivatives or analogues of known inhibitors or activators. Methods for the preparation of chemical derivatives and analogues are well known to those skilled in the art and are described in, for example, Beilstein, Handbook of Organic Chemistry, Springer edition New York Inc., 175 Fifth Avenue, New York, N.Y. 10010 U.S.A. and Organic Synthesis, Wiley, New York, USA. Furthermore, said derivatives and analogues can be tested for their effects according to methods known in the art. Furthermore, peptidomimetics and/or computer aided design of appropriate derivatives and analogues can be used, for example, according to the methods described above. The cell or tissue that may be employed in the process preferably is a host cell, plant cell or plant tissue of the invention described in the embodiments hereinbefore.

[1019] Thus, in a further embodiment the invention relates to a compound obtained or identified according to the method for identifiying an antagonist of the invention said compound being an antagonist of the polypeptide of the present invention.

[1020] Accordingly, in one embodiment, the present invention further relates to a compound identified by the method for identifying a compound of the present invention.

[1021] Said compound is, for example, an antagonistic homolog of the poly-peptide of the present invention. Antagonistic homologues of the polypeptide to be reduced in the process of the present invention can be generated by mutagenesis, e.g., discrete point mutation or truncation of the polypeptide of the present invention. As used herein, the term “antagonistic homologue” refers to a variant form of the protein, which acts as an antagonist of the activity of the polypeptide of the present invention. An anatgonist of a protein as depicted in column 5 or 7 of Table II or being ecoded by a nucleic acid molecule comprising a polynucleotide as depicted in column 5 or 7 of Table I or a homologue thereof as described herein, has at least partly lost the biological activities of the polypeptide of the present invention. In particular, said antagonist confers a decrease of the expression level of the polypeptide as depicted in column 5 or 7 of Table II or being ecoded by a nucleic acid molecule comprising a polynucleotide as depicted in column 5 or 7 of Table I or a homologue thereof as described herein and thereby the expression of said antagonist in an organisms or part thereof confers the increased tolerance and/or resistance to environmental stress and increased biomass production as compared to a corresponding non-transformed wild type plant. A typical antagonsist in that sense would be a dominant negative version of the nucleic acid molecule or polypeptide which activity is to be reduced in the process of the invention, for example a protein which still can partizipates in a protein complex, but cannot anymore fulfill its orginal biological, for example enzymatical function, thereby nearly inactivating the complete complex.

[1022] In one embodiment, the invention relates to an antibody specifically recognizing the compound or antagonist of the present invention.

[1023] The invention also relates to a diagnostic composition comprising at least one of the aforementioned nucleic acid molecules, antisense nucleic acid molecule, RNAi, snRNA, dsRNA, siRNA, miRNA, ta-siRNA, cosuppression molecule, ribozyme, vectors, proteins, antibodies or compounds of the invention and optionally suitable means for detection.

[1024] The diagnostic composition of the present invention is suitable for the isolation of mRNA from a cell and contacting the mRNA so obtained with a probe comprising a nucleic acid probe as described above under hybridizing conditions, detecting the presence of mRNA hybridized to the probe, and thereby detecting the expression of the protein in the cell. Further methods of detecting the presence of a protein according to the present invention comprise immunotechniques well known in the art, for example enzyme linked immunoadsorbent assay. Furthermore, it is possible to use the nucleic acid molecules according to the invention as molecular markers or primers in plant breeding. Suitable means for detection are well known to a person skilled in the art, e.g. buffers and solutions for hydridization assays, e.g. the aforementioned solutions and buffers, further and means for Southern-, Western-, Northern etc. -blots, as e.g. described in Sambrook et al. are known. In one embodiment diagnostic composition contain PCR primers designed to specifically detect the presense or the expression level of the nucleic acid molecule to be reduced in the process of the invention, e.g. of the nucleic acid molecule of the invention, or to descriminate between different variants or alleles of the nucleic acid molecule of the invention or which activity is to be reduced in the process of the invention.

[1025] In another embodiment, the present invention relates to a kit comprising the nucleic acid molecule, the vector, the host cell, the polypeptide, or the antisense, RNAi, snRNA, dsRNA, siRNA, miRNA, ta-siRNA, cosuppression molecule, or ribozyme molecule, or the viral nucleic acid molecule, the antibody, plant cell, the plant or plant tissue, the harvestable part, the propagation material and/or the compound and/or antagonist identified according to the method of the invention.

[1026] The compounds of the kit of the present invention may be packaged in containers such as vials, optionally with/in buffers and/or solution. If appropriate, one or more of said components might be packaged in one and the same container. Additionally or alternatively, one or more of said components might be adsorbed to a solid support as, e.g. a nitrocellulose filter, a glas plate, a chip, or a nylon membrane or to the well of a micro titerplate. The kit can be used for any of the herein described methods and embodiments, e.g. for the production of the host cells, transgenic plants, pharmaceutical compositions, detection of homologous sequences, identification of antagonists or agonists, as food or feed or as a supplement thereof or as supplement for the treating of plants, etc.

[1027] Further, the kit can comprise instructions for the use of the kit for any of said embodiments, in particular for the use for producing organisms or part thereof having an increased tolerance and/or resistance to environmental stress and increased biomass production as compared to a corresponding non-transformed wild type plant.

[1028] In one embodiment said kit comprises further a nucleic acid molecule encoding one or more of the aforementioned protein, and/or an antibody, a vector, a host cell, an antisense nucleic acid, a plant cell or plant tissue or a plant. In another embodiment said kit comprises PCR primers to detect and discrimante the nucleic acid molecule to be reduced in the process of the invention, e.g. of the nucleic acid molecule of the invention.

[1029] In a further embodiment, the present invention relates to a method for the production of an agricultural composition providing the nucleic acid molecule for the use according to the process of the invention, the nucleic acid molecule of the invention, the vector of the invention, the antisense, RNAi, snRNA, dsRNA, siRNA, miRNA, ta-siRNA, cosuppression molecule, ribozyme, or antibody of the invention, the viral nucleic acid molecule of the invention, or the polypeptide of the invention or comprising the steps of the method according to the invention for the identification of said compound or antagonist; and formulating the nucleic acid molecule, the vector or the poly-peptide of the invention or the antagonist, or compound identified according to the methods or processes of the present invention or with use of the subject matters of the present invention in a form applicable as plant agricultural composition.

[1030] In another embodiment, the present invention relates to a method for the production of supporting plant culture composition comprising the steps of the method of the present invention; and formulating the compound identified in a form acceptable as agricultural composition.

[1031] Under “acceptable as agricultural composition” is understood, that such a composition is in agreement with the laws regulating the content of fungicides, plant nutrients, herbicides, etc. Preferably such a composition is without any harm for the protected plants and the animals (humans included) fed therewith.

[1032] The nucleic acid molecules disclosed herein, in particular the nucleic acid as depicted column 5 or 7 of Table IA or B, have a variety of uses. First, they may be used to identify an organism or a close relative thereof. Also, they may be used to identify the presence thereof or a relative thereof in a mixed population of plants. By probing the extracted genomic DNA of a culture of a unique or mixed population of plants under stringent conditions with a probe spanning a region of the gene of the present invention which is unique to this, one can ascertain whether the present invention has been used or whether it or a close relative is present.

[1033] Further, the nucleic acid molecule disclosed herein, in particular the nucleic acid molecule as depicted column 5 or 7 of Table IA or B, may be sufficiently homologous to the sequences of related species such that these nucleic acid molecules may serve as markers for the construction of a genomic map in related organism or for association mapping. Furthermore natural variation in the genomic regions corresponding to nucleic acids disclosed herein, in particular the nucleic acid molecule as depicted column 5 or 7 of Table IA or B, or homologous thereof may lead to variation in the activity of the proteins disclosed herein, in particular the proteins comprising polypeptides as depicted in column 5 or 7 of Table IIA or B or comprising the consensus sequence or the polypeptide motif as shown in column 7 of Table IV, and their homolgos and in consequence in natural variation.

[1034] In consequence natural variation eventually also exists in form of less active allelic variants leading already to a relative increased tolerance and/or resistance to environmental stress and increased biomass production.

[1035] Accordingly, the present invention relates to a method for breeding plants, comprising
[1036] a) selecting a first plant variety with increased tolerance and/or resistance to environmental stress and increased biomass production as compared to a corresponding non-transformed wild type plant by reducing, repressing, decreasing or deleting the expression of a polypeptide or nucleic acid molecule which activity is reduced in the process of the present invention, e.g. as disclosed herein, in particular of a nucleic acid molecule comprising a nucleic acid molecule as depicted in column 5 or 7 of Table IA or B or a polypeptide comprising a polypeptide as shown in column 5 or 7 of Table IIA or B or comprising a consensus sequence or a polypeptide motif as depicted in column 7 of Table IV, or a homologue thereof as described herein;
[1037] b) associating the increased tolerance and/or resistance to environmental stress and increased biomass production as compared to a corresponding non-transformed wild type plant with the expression level or the genomic structure of a gene encoding said polypeptide or said nucleic acid molecule;
[1038] c) crossing the first plant variety with a second plant variety, which significantly differs in its tolerance and/or resistance to environmental stress and its biomass production; and
[1039] d) identifying, which of the offspring varieties has got the increased tolerance and/or resistance to environmental stress and increased biomass production as compared to a corresponding non-transformed wild type plant by means of analyzing level of tolerance and/or resistance to environmental stress and biomass production or the expression of said polypeptide or nucleic acid molecule or the genomic structure of the genes encoding said polypeptide or nucleic acid molecule of the invention.
   In one embodiment, the expression level of the gene according to step (b) is reduced.

[1040] The nucleic acid molecules of the invention are also useful for evolutionary and protein structural studies. By comparing the sequences, e.g. as depicted in column 5 or 7 of Table I, to those encoding similar enzymes from other organisms, the evolutionary relatedness of the organisms can be assessed. Similarly, such a comparison permits an assessment of which regions of the sequence are conserved and which are not, which may aid in determining those regions of the protein which are essential for the functioning of the enzyme. This type of determination is of value for protein engineering studies and may give an indication of what the protein can tolerate in terms of mutagenesis without losing function.

[1041] Accordingly, the nucleic acid molecule disclosed herein, e.g. the nucleic acid molecule which activity is to be reduced according to the process of the invention, e.g. as depicted in column 5 or 7 of Table I, or a homologue thereof, can be used for the identification of other nucleic acids conferring an increased tolerance and/or resistance to environmental stress and increased biomass production as compared to a corresponding non-transformed wild type plant after reduction, repression, decrease or deletion of their expression.

[1042] Further, disclosed herein, e.g. the nucleic acid molecule which activity is to be reduced according to the process of the invention, e.g. as depicted in column 5 or 7 of Table I, or a homologue thereof, in particular the nucleic acid molecule of the invention, or a fragment or a gene conferring the expression of the encoded expression product, e.g. the polypeptide of the invention, can be used for marker assisted breeding or association mapping of the tolerance and/or resistance to environmental stress and biomass production related traits.

[1043] These and other embodiments are disclosed and encompassed by the description and examples of the present invention.

[1044] Further literature concerning any one of the methods, uses and compounds to be employed in accordance with the present invention may be retrieved from public libraries, using for example electronic devices.

[1045] For example the public database “Medline” may be utilized which is available on the Internet, for example under hftp://www.ncbi.nlm.nih.gov/PubMed/medline.html. Further databases and addresses, such as hftp://www.ncbi.nlm.nih.gov/, hftp://www.infobiogen. fr/, hftp://www.fmi.ch/biology/research-tools.html, hftp://www.tigr.org/, are known to the person skilled in the art and can also be obtained using, e.g., hftp://www.lycos.com. An overview of patent information in biotechnology and a survey of relevant sources of patent information useful for retrospective searching and for current awareness is given in Berks, TIBTECH 12 (1994), 352-364.

[1046] The present invention is illustrated by the examples and the figures (FIG. 1-3), which follow:

[1047] Example

[1048] Engineering of Arabidopsis plants by inactivation or down-regulation of stress related genes.

[1049] Vector Preparation

[1050] A binary knock out vector was constructed based on the modified pPZP binary vector backbone (comprising the kanamycin-gene for bacterial selection; Hajdukiewicz, P. et al., 1994, Plant Mol. Biol., 25: 989-994) and the selection marker bargene (De Block et al., 1987, EMBO J. 6, 2513-2518) driven by the mas2′1′ and mas271f promoters (Velten et al., 1984, EMBO J. 3, 2723-2730; Mengiste, Amedeo and Paszkowski, 1997, Plant J., 12, 945-948). The resulting vector, used for insertional mutagenesis, was pMTX1a300 SEQ ID NO.: 1.

[1051] Examples of other usable binary vectors for insertional mutagenesis are pBIN19, pBI101, pBinAR, pSun or pGPTV. An overview over binary vectors and their specific features is given in Hellens et al., 2000, Trends in plant Science, 5:446-451and in Guerineau F., Mullineaux P., 1993, Plant transformation and expression vectors in plant molecular biology, LABFAX Series, (Croy R. R. D., ed.) pp. 121-127 Bios Scientific Publishers, Oxford

[1052] Transformation of Agrobacteria

[1053] The plasmid was transformed into Agrobacterium tumefaciens (GV3101pMP90; Koncz and Schell, 1986 Mol. Gen. Genet. 204:383-396) using heat shock or electroporation protocols. Transformed colonies were grown on YEB medium and selected by respective antibiotics (Rif/Gent/Km) for 2 d at 28 C. These agrobacteria cultures were used for the plant transformation.

[1054] Arabidopsis thaliana of the ecotype C24 were grown and transformed according to standard conditions (Bechtold, N., Ellis, J., Pelletier, G. 1993. In planta Agrobacterium mediated gene transfer by infiltration of Arabidopsis thaliana plants, C. R. Acad. Sci. Paris 316:1194-1199; Bent, A. F., Clough, J. C., 1998; Floral dip: a simplified method for Agrobacterium-mediated transformation of Arabidopsis thaliana, PLANT J. 16:735-743).

[1055] Transformed plants (F1) were selected by the use of their respective resistance marker. In case of BASTA®-resistance, plantlets were sprayed four times at an interval of 2 to 3 days with 0.02% BASTA® and transformed plants were allowed to set seeds. 50-100 seedlings (F2) were subjected again to marker selection, in case of BASTA-resistance by spaying with 0.1% BASTA® on 4 consecutive days during the plantlet phase. Plants segregating for a single resistance locus (approximately 3:1 resistant seedling to sensitive seedlings) were chosen for further analysis. From these lines three of the resistant seedlings (F2) were again allowed to set seeds and were tested for homozygosis through in-vitro germination of their seeds (F3) on agar medium containing the selection agent (BASTA®, 15 mg/L ammonium glufosinate, Pestanal, Riedel de Haen, Seelze, Germany). Those F2 lines which showed nearly 100% resistant offspring (F3) were considered homozygote and taken for functional analysis.

[1056] Measurement of Stress Tolerance and Increased Biomass

[1057] Transformed A. thaliana plants were grown individually in pots containing a 4:1 (v/v) mixture of soil and quartz sand in a growth chamber (York Industriekalte GmbH, Mannheim, Germany). To induce germination, sown seeds were kept at 4° C., in the dark, for 3 days. Subsequently conditions were changed for 3 d to 20° C/6° C. day/night temperature with a 16/8 h day-night cycle at 150 μE/m²s. Standard growth conditions were: photoperiod of 16 h light and 8 h dark, 20° C., 60% relative humidity, and a photon flux density of 200 μE. Plants were watered daily until they were approximately 3 weeks old at which time drought was imposed by withholding water. After approximately 12 days of withholding water, most plants showed visual symptoms of injury, such as wilting and leaf browning, whereas tolerant or resistant plants were identified as being visually turgid and healthy green in color. Plants were scored for symptoms of drought symptoms and biomass production comparison to wild type and neighboring plants for 5-6 days in succession.

[1058] Three successive experiments were conducted. In the first experiment, one individual of each transformed line was tested.

[1059] In the second experiment, the lines that had been scored as drought tolerant or resistant in the first experiment, i.e. survived longer than the wild type control and showed increaed biomass production in comparison to wild type and neighbouring plants, were put through a confirmation screen according to the same experimental procedures. In this experiment, max. 10 plants of each tolerant or resistant line were grown, treated and scored as before.

[1060] In the first two experiments, resistance or tolerance biomass production was measured compared to neighboring and wild type plants.

[1061] In the third experiment (table 1), 15 replicates of each confirmed tolerant line, i.e. those that had been scored as tolerant or resistant in the second experiment, were grown, treated and scored as before.

[1062] In the third experiment, after approximately 10 days of drought, the control (non-transformed Arabidopsis thaliana) and most transformed lines in the test showed extreme visual symptoms of stress including necrosis and cell death. Several transformed plants retained viability as shown by their turgid appearance and maintenance of green color.

[1063] Table 1:

[1064] Table 1: Duration of survival and biomass production of transformed Arabidopsis thaliana after imposition of drought stress on 3-week-old plants. Drought tolerance and biomass production was measured visually at daily intervals. Average performance is the average of transgenic plants that survived longer than the wild type control. Maximum performance is the longest period that any single transformed plant survived longer than the wild type control. Average biomass is the average of days of transgenic plants plants increase in biomass in comparison to the wild type control and neighbouring plants. Maximum biomass is the longest period that any single transformed plant showed increase in biomass in comparison to the wild type control and neighbouring plants.

TABLE 1

| | | Average | | | |
|---|---|---|---|---|---|
| | | Perfor- | Maximum | Average | Maximum |
| SeqID | Locus | mance | Performance | Biomass | Biomass |
| 1418 | At5g50870 | 2.7 | 5 | 0.6 | 2 |
| 1025 | At4g31120 | 4.7 | 5 | 0.5 | 5 |
| 729 | At3g14230 | 1.8 | 4 | 1.2 | 3 |
| 27 | At1g12110 | 3 | 5 | 1.8 | 3 |
| 104 | At1g13270 | 2.9 | 5 | 1.4 | 3 |
| 190 | At1g27080 | 2.9 | 5 | 1.3 | 2 |
| 512 | AT1G58360 | 2.5 | 4 | 1 | 2 |
| 1464 | At5g60780 | 2.4 | 5 | 1.3 | 3 |
| 813 | At3g54920 | 2.7 | 4 | 1 | 3 |
| 673 | AT2G03670 | 2.8 | 5 | 1.5 | 4 |
| 27 | At1g12110 | 2.7 | 5 | 1.7 | 4 |
| 512 | AT1G58360 | 2.9 | 5 | 1.4 | 2 |
| 1385 | At5g40590 | 2.5 | 5 | 0.9 | 2 |
| 410 | At1g33760 | 2.7 | 5 | 1.2 | 4 |
| 923 | At4g13430 | 2.5 | 5 | 1.3 | 4 |
| 1593 | At5g66160 | 4 | 5 | 0.1 | 0.1 |
| 1083 | At5g02330 | 2.2 | 4 | 1 | 3 |
| 1551 | At5g64070 | 2.3 | 4 | 0.7 | 2 |
| 1650 | At3g55990 | 4.5 | 5 | 2.2 | 4 |

[1065] Analysis of the Selected Stress Resistant Lines

[1066] Since the lines were preselected for single insertion loci and a homozygous situation of the resistance marker, the disruption (or mutation) of single genes through the integration of the T-DNA were expected to have lead to the stress-resistant phenotype. Lines which showed a consistent phenotype were chosen for molecular analysis.

[1067] Genomic DNA was purified from approximately 100 mg of leaf tissue from these lines using standard procedures (either spins columns from Qiagen, Hilden, Germany or the Nucleon Phytopure Kit from Amersham Biosciences, Freiburg, Germany). The amplification of the insertion side of the T-DNA was achieved using two different methods. Either by an adaptor PCR-method according to Spertini D, Béliveau C. and Bellemare G., 1999, Biotechniques, 27, 308-314 using T-DNA specific primers LB1 (5′-TGA CGC CAT TTC GCC TTT TCA-3′; SEQ ID NO: 4) or RB 1-2 (5′-CAA CTT AAT CGC CTT GCA GCA CA-3′; SEQ ID NO: 5) for the first and LB2 (5′-CAG AAA TGG ATA AAT AGC CTT GCT TCC-3′; SEQ ID NO: 6) or RB4-2 (5′-AGC TGG CGT AAT AGC GAA GAG-3′; SEQ ID NO: 7) for the second PCR respectively. Alternatively TAIL-PCR (Liu Y-G, Mitsukawa N, Oosumi T and Whittier R F, 1995, Plant J. 8, 457-463) was performed. In this case for the first PCR LB1 (5′-TGA CGC CAT TTC GCC TTT TCA-3′, SEQ ID NO: 4) or RB1-2 (5′-CAA CTT AAT CGC CTT GCA GCA CA-3′; SEQ ID NO: 5), for the second PCR LB2 (5′ -CAG AAA TGG ATA AAT AGC CTT GCT TCC-3′; SEQ ID NO: 6) or RB4-2 (5′-AGC TGG CGT AAT AGC GAA GAG- 3′, SEQ ID NO: 7) and for the last PCR LB3 (5′-CCA ATA CAT TAC ACT AGC ATC TG-3′; SEQ ID NO: 8) or RB5 (5′-AAT GCT AGA GCA GCT TGA-3′; SEQ ID NO: 9) were used as T-DNA specific primers for left or right T-DNA borders respectively.

[1068] Appropriate PCR-products were identified on agarose gels and purified using columns and standard procedures (Qiagen, Hilden, Germany). PCR-products were sequenced with additional T-DNA-specific primers located towards the borders relative to the primers used for amplification. For adaptor PCR products containing left border sequences primer LBseq (5′-CAA TAC ATT ACA CTA GCA TCT G-3′; SEQ ID NO: 10) and for sequences containing right border sequences primer RBseq (5′-AGA GGC CCG CAC CGA TCG-3′; SEQ ID NO: 11) were used for sequencing reactions. For TAIL PCR products containing left border sequences primer LBseq2 (5′-CTA GCA TCT GAA TTT CAT AAC C-3′; SEQ ID NO: 12) and for PCR products containing right border sequences primer RBseq2 (5′-GCT TGA GCT TGG ATC AGA TTG-3′; SEQ ID NO: 13) were used for sequencing reactions. The resulting sequences were taken for comparison with the available Arabidopsis genome sequence from Genbank using the blast algorithm (Alt-schul et al., 1990. J Mol Biol, 215:403-410).

[1069] Further details on PCR products used to identify the genomic locus are given in table 2 below. Indicated are the identified annotated open reading frame in the Arabidopsis genome, the estimated size of the obtained PCR product (in base pairs), the T-DNA border (LB: left border, RB: right border) for which the amplification was achieved, the method which resulted in the indicated PCR product (explanation see text above), the respective restriction enzymes in case of adaptor PCR, and the degenerated primer in the case of TAIL PCR. Routinely degenerated primers
[1070] ADP2 (5′-NGT CGA SWG ANA WGA A-3′; SEQ ID NO: 14),
[1071] ADP3 (5′-WGTGNAGWANCANAGA-3′; SEQ ID NO: 15),
[1072] ADP5 (5′-STT GNT AST NCT NTG C-3′; SEQ ID NO: 16),
[1073] ADP6 (5′-AGWGNAGWANCANAGA-3′; SEQ ID NO: 17),
[1074] ADP8 (5′-NTGCGASWGANWAGAA-3′; SEQ ID NO: 18),
[1075] ADP9 (5′-NTG CGA SWG ANT AGA A-3′; SEQ ID NO: 19) and
[1076] ADP11 (5′-SST GGS TAN ATW ATW CT-3′; SEQ ID NO: 20) were used.

[1077] The identification of the insertion locus in each case was confirmed by a control PCR, using one of the above mentioned T-DNA-specific primers and a primer deduced from the identified genomic locus, near to the insertion side. The amplification of a PCR-product of the expected size from the insertion line using these two primers proved the disruption of the identified locus by the T-DNA integration.

[1078] Table 2: Details on PCR products used to identify the down-regulated gene in lines showing increased tolerance and/or resistance to environmental stress and increased biomass production as compared to a corresponding non-transformed wild type plant. The down regulated gene is defined by its TAIR Locus (Locus).

TABLE 2
PCR-products

| | | | | Restriction enzyme |
|---|---|---|---|---|
| | | | | or deg. |
| SEQ ID | Locus | Border | Method | primer |
| 1418 | At5g50870 | RB | Adapter | MunI |
| 1025 | At4g31120 | LB | Adapter | SpeI |
| 729 | At3g14230 | LB | Adapter | BgllI |
| 27 | At1g12110 | LB | Adapter | BgllI |
| 104 | At1g13270 | LB | Adapter | MunI |
| 190 | At1g27080 | RB | Adapter | Psp1406I/Bsp119I |
| 512 | AT1G58360 | RB | Adapter | MunI |
| 1464 | At5g60780 | LB | Adapter | Psp1406I/Bsp119I |
| 813 | At3g54920 | LB | Adapter | BgllI |
| 673 | AT2G03670 | LB | Adapter | BgllI |
| 27 | At1g12110 | LB | Adapter | BgllI |
| 512 | AT1G58360 | RB | Adapter | MunI |
| 1385 | At5g40590 | LB | Adapter | SpeI |
| 410 | At1g33760 | LB | Adapter | SpeI |
| 923 | At4g13430 | LB | Adapter | Psp1406I/Bsp119I |
| 1593 | At5g66160 | RB | Adapter | SpeI |
| 1083 | At5g02330 | LB | Adapter | MunI |
| 1551 | At5g64070 | RB | Adapter | SpeI |
| 1650 | At3g55990 | LB | Adapter | Psp1406I/Bsp119I |

[1079] Column 1 refers to the SEQ ID NO.: of the gene which has been knocked out, column 2 refers to the TAIR Locus of the knocked out gene (Locus), column 3 refers to the T-DNA border for which the PCR product was amplified, column 4 refers to the PCR method for amplification and column 5 refers to restriction enzyme of degenerate primer used in the PCR method (for detailed examplation to columns 4 and 5 see text above; APX means either primer AP2, primer AP5, primer AP6, primer AP9 or primer AP11)

[1080] Construction of antisense constructs for repression of the activity or expression of a gene, e.g. a gene comprising SEQ ID NO.: 1025

[1081] Construction of antisense constructs for repression of the activity or expression of a gene, e.g. a gene comprising SEQ ID NO.: 104

[1082] Construction of antisense constructs for repression of the activity or expression of a gene, e.g. a gene comprising SEQ ID NO.: 190

[1083] Construction of antisense constructs for repression of the activity or expression of a gene, e.g. a gene comprising SEQ ID NO.: 410

[1084] Construction of antisense constructs for repression of the activity or expression of a gene, e.g. a gene comprising SEQ ID NO.: 512

[1085] Construction of antisense constructs for repression of the activity or expression of a gene, e.g. a gene comprising SEQ ID NO.: 673

[1086] Construction of antisense constructs for repression of the activity or expression of a gene, e.g. a gene comprising SEQ ID NO.: 729

[1087] Construction of antisense constructs for repression of the activity or expression of a gene, e.g. a gene comprising SEQ ID NO.: 27

[1088] Construction of antisense constructs for repression of the activity or expression of a gene, e.g. a gene comprising SEQ ID NO.: 923

[1089] Construction of antisense constructs for repression of the activity or expression of a gene, e.g. a gene comprising SEQ ID NO.: 1083

[1090] Construction of antisense constructs for repression of the activity or expression of a gene, e.g. a gene comprising SEQ ID NO.: 1385

[1091] Construction of antisense constructs for repression of the activity or expression of a gene, e.g. a gene comprising SEQ ID NO.: 1418

[1092] Construction of antisense constructs for repression of the activity or expression of a gene, e.g. a gene comprising SEQ ID NO.: 1464

[1093] Construction of antisense constructs for repression of the activity or expression of a gene, e.g. a gene comprising SEQ ID NO.: 1551

[1094] Construction of antisense constructs for repression of the activity or expression of a gene, e.g. a gene comprising SEQ ID NO.: 1593

[1095] Construction of antisense constructs for repression of the activity or expression of a gene, e.g. a gene comprising SEQ ID NO.: 813

[1096] Construction of antisense constructs for repression of the activity or expression of a gene, e.g. a gene comprising SEQ ID NO.: 1650

[1097] A fragment of SEQ ID NO: 1025 is amplified by PCR. To enable cloning of the PCR product, restriction sites may be added to the primers used for the amplification. Alternatively recombination sites may be added to the primers to enable a recombination reaction. The PCR fragment is either cloned or recombined into a binary vector, preferently under control of a strong constitutive, tissue or developmental specific promoters in a way, that the orientation to the direction of the gene is opposite of the direction the gene has in its original genomic position.

[1098] A fragment of SEQ ID NO: 104 is amplified by PCR. To enable cloning of the PCR product, restriction sites may be added to the primers used for the amplification. Alternatively recombination sites may be added to the primers to enable a recombination reaction. The PCR fragment is either cloned or recombined into a binary vector, preferently under control of a strong constitutive, tissue or developmental specific promoters in a way, that the orientation to the direction of the gene is opposite of the direction the gene has in its original genomic position.

[1099] A fragment of SEQ ID NO: 190 is amplified by PCR. To enable cloning of the PCR product, restriction sites may be added to the primers used for the amplification. Alternatively recombination sites may be added to the primers to enable a recombination reaction. The PCR fragment is either cloned or recombined into a binary vector, preferently under control of a strong constitutive, tissue or developmental specific promoters in a way, that the orientation to the direction of the gene is opposite of the direction the gene has in its original genomic position.

[1100] A fragment of SEQ ID NO: 410 is amplified by PCR. To enable cloning of the PCR product, restriction sites may be added to the primers used for the amplification. Alternatively recombination sites may be added to the primers to enable a recombination reaction. The PCR fragment is either cloned or recombined into a binary vector, preferently under control of a strong constitutive, tissue or developmental specific promoters in a way, that the orientation to the direction of the gene is opposite of the direction the gene has in its original genomic position.

[1101] A fragment of SEQ ID NO: 512 is amplified by PCR. To enable cloning of the PCR product, restriction sites may be added to the primers used for the amplification. Alternatively recombination sites may be added to the primers to enable a recombination reaction. The PCR fragment is either cloned or recombined into a binary vector, preferently under control of a strong constitutive, tissue or developmental specific promoters in a way, that the orientation to the direction of the gene is opposite of the direction the gene has in its original genomic position.

[1102] A fragment of SEQ ID NO: 673 is amplified by PCR. To enable cloning of the PCR product, restriction sites may be added to the primers used for the amplification. Alternatively recombination sites may be added to the primers to enable a recombination reaction. The PCR fragment is either cloned or recombined into a binary vector, preferently under control of a strong constitutive, tissue or developmental specific promoters in a way, that the orientation to the direction of the gene is opposite of the direction the gene has in its original genomic position.

[1103] A fragment of SEQ ID NO: 729 is amplified by PCR. To enable cloning of the PCR product, restriction sites may be added to the primers used for the amplification. Alternatively recombination sites may be added to the primers to enable a recombination reaction. The PCR fragment is either cloned or recombined into a binary vector, preferently under control of a strong constitutive, tissue or developmental specific promoters in a way, that the orientation to the direction of the gene is opposite of the direction the gene has in its original genomic position.

[1104] A fragment of SEQ ID NO: 27 is amplified by PCR. To enable cloning of the PCR product, restriction sites may be added to the primers used for the amplification. Alternatively recombination sites may be added to the primers to enable a recombination reaction. The PCR fragment is either cloned or recombined into a binary vector, preferently under control of a strong constitutive, tissue or developmental specific promoters in a way, that the orientation to the direction of the gene is opposite of the direction the gene has in its original genomic position.

[1105] A fragment of SEQ ID NO: 923 is amplified by PCR. To enable cloning of the PCR product, restriction sites may be added to the primers used for the amplification. Alternatively recombination sites may be added to the primers to enable a recombination reaction. The PCR fragment is either cloned or recombined into a binary vector, preferently under control of a strong constitutive, tissue or developmental specific promoters in a way, that the orientation to the direction of the gene is opposite of the direction the gene has in its original genomic position.

[1106] A fragment of SEQ ID NO: 1083 is amplified by PCR. To enable cloning of the PCR product, restriction sites may be added to the primers used for the amplification. Alternatively recombination sites may be added to the primers to enable a recombination reaction. The PCR fragment is either cloned or recombined into a binary vector, preferently under control of a strong constitutive, tissue or developmental specific promoters in a way, that the orientation to the direction of the gene is opposite of the direction the gene has in its original genomic position.

[1107] A fragment of SEQ ID NO: 1385 is amplified by PCR. To enable cloning of the PCR product, restriction sites may be added to the primers used for the amplification. Alternatively recombination sites may be added to the primers to enable a recombination reaction. The PCR fragment is either cloned or recombined into a binary vector, preferently under control of a strong constitutive, tissue or developmental specific promoters in a way, that the orientation to the direction of the gene is opposite of the direction the gene has in its original genomic position.

[1108] A fragment of SEQ ID NO: 1418 is amplified by PCR. To enable cloning of the PCR product, restriction sites may be added to the primers used for the amplification. Alternatively recombination sites may be added to the primers to enable a recombination reaction. The PCR fragment is either cloned or recombined into a binary vector, preferently under control of a strong constitutive, tissue or developmental specific promoters in a way, that the orientation to the direction of the gene is opposite of the direction the gene has in its original genomic position.

[1109] A fragment of SEQ ID NO: 1464 is amplified by PCR. To enable cloning of the PCR product, restriction sites may be added to the primers used for the amplification. Alternatively recombination sites may be added to the primers to enable a recombination reaction. The PCR fragment is either cloned or recombined into a binary vector, preferently under control of a strong constitutive, tissue or developmental specific promoters in a way, that the orientation to the direction of the gene is opposite of the direction the gene has in its original genomic position.

[1110] A fragment of SEQ ID NO: 1551 is amplified by PCR. To enable cloning of the PCR product, restriction sites may be added to the primers used for the amplification. Alternatively recombination sites may be added to the primers to enable a recombination reaction. The PCR fragment is either cloned or recombined into a binary vector, preferently under control of a strong constitutive, tissue or developmental specific promoters in a way, that the orientation to the direction of the gene is opposite of the direction the gene has in its original genomic position.

[1111] A fragment of SEQ ID NO: 1593 is amplified by PCR. To enable cloning of the PCR product, restriction sites may be added to the primers used for the amplification. Alternatively recombination sites may be added to the primers to enable a recombination reaction. The PCR fragment is either cloned or recombined into a binary vector, preferently under control of a strong constitutive, tissue or developmental specific promoters in a way, that the orientation to the direction of the gene is opposite of the direction the gene has in its original genomic position.

[1112] A fragment of SEQ ID NO: 813 is amplified by PCR. To enable cloning of the PCR product, restriction sites may be added to the primers used for the amplification. Alternatively recombination sites may be added to the primers to enable a recombination reaction. The PCR fragment is either cloned or recombined into a binary vector, preferently under control of a strong constitutive, tissue or developmental specific promoters in a way, that the orientation to the direction of the gene is opposite of the direction the gene has in its original genomic position.

[1113] A fragment of SEQ ID NO: 1650 is amplified by PCR. To enable cloning of the PCR product, restriction sites may be added to the primers used for the amplification. Alternatively recombination sites may be added to the primers to enable a recombination reaction. The PCR fragment is either cloned or recombined into a binary vector, preferently under control of a strong constitutive, tissue or developmental specific promoters in a way, that the orientation to the direction of the gene is opposite of the direction the gene has in its original genomic position.

[1114] The amplification of a fragment of a sequences indicated in a line of column 5 of Table III can be performed using those primers which are indicated in column 7 in the respective same line in the same Table III, comprising the extensions 5′-ATACCCGGG-3′ (SEQ ID NO.: 21) or 5′-ATAGAGCTC-3′ (SEQ ID NO.: 22). The extensions 5′-ATACCCGGG-3_{—} (SEQ ID NO.: 21) or 5′-ATAGAGCTC (SEQ ID NO.: 22) contain the Xmal and Sacl restriction enzyme recognition sides, respectively, for cloning purposes.

[1115] The Oligonucleotides are solved in water to give a concentration of 20 μM. The PCR reaction contains 5 μl Herculase buffer (Stratagene), 0.4 μl dNTPs (25 mM each) (Amersham), 0.5 μl of each primer, 0.5 μl Herculase (Stratagene), 0.5 μl gDNA and 42.6 μl water. The PCR is performed on MJ-Cycler Tetrad (BioZym) with the following programm:

[1116] 4 min 94° C., followed by 30 cycles of 1 min 94° C., 1 min 50° C., 2 min 72° C. followed by 10 min 72° C. and cooling to 25° C.

[1117] The PCR product can be purified using a Kit from Qiagen. The DNA is subsequently digested with Xmal/Sacl at 37° C. over night. The fragment can then be cloned into the vector 1bxPcUbicolic SEQ ID NO.: 2, which is digested with Xmal/Sacl.

[1118] Construction of RNAi constructs for repression of the activity or expression of a gene, e.g. of a gene comprising SEQ ID NO.: 1025

[1119] Construction of RNAi constructs for repression of the activity or expression of a gene, e.g. of a gene comprising SEQ ID NO.: 104

[1120] Construction of RNAi constructs for repression of the activity or expression of a gene, e.g. of a gene comprising SEQ ID NO.: 190

[1121] Construction of RNAi constructs for repression of the activity or expression of a gene, e.g. of a gene comprising SEQ ID NO.: 410

[1122] Construction of RNAi constructs for repression of the activity or expression of a gene, e.g. of a gene comprising SEQ ID NO.: 512

[1123] Construction of RNAi constructs for repression of the activity or expression of a gene, e.g. of a gene comprising SEQ ID NO.: 673

[1124] Construction of RNAi constructs for repression of the activity or expression of a gene, e.g. of a gene comprising SEQ ID NO.: 729

[1125] Construction of RNAi constructs for repression of the activity or expression of a gene, e.g. of a gene comprising SEQ ID NO.: 27

[1126] Construction of RNAi constructs for repression of the activity or expression of a gene, e.g. of a gene comprising SEQ ID NO.: 923

[1127] Construction of RNAi constructs for repression of the activity or expression of a gene, e.g. of a gene comprising SEQ ID NO.: 1083

[1128] Construction of RNAi constructs for repression of the activity or expression of a gene, e.g. of a gene comprising SEQ ID NO.: 1385

[1129] Construction of RNAi constructs for repression of the activity or expression of a gene, e.g. of a gene comprising SEQ ID NO.: 1418

[1130] Construction of RNAi constructs for repression of the activity or expression of a gene, e.g. of a gene comprising SEQ ID NO.: 1464

[1131] Construction of RNAi constructs for repression of the activity or expression of a gene, e.g. of a gene comprising SEQ ID NO.: 1551

[1132] Construction of RNAi constructs for repression of the activity or expression of a gene, e.g. of a gene comprising SEQ ID NO.: 1593

[1133] Construction of RNAi constructs for repression of the activity or expression of a gene, e.g. of a gene comprising SEQ ID NO.: 813

[1134] Construction of RNAi constructs for repression of the activity or expression of a gene, e.g. of a gene comprising SEQ ID NO.: 1650

[1135] A fragment of SEQ ID NO: 1025 is amplified by PCR. To enable cloning of the PCR product, restriction sites may be added to the primers used for the amplification. Alternatively recombinationsites may be added to the primers to enable a recombination reaction. The PCR fragment is either cloned or recombined into a binary vector, preferently under control of a strong constitutive, tissue or developmental specific promoters in a way, that the fragment is introduced twice in the vector as an inverted repeat, the repeats separated by a DNA spacer.

[1136] A fragment of SEQ ID NO: 104 is amplified by PCR. To enable cloning of the PCR product, restriction sites may be added to the primers used for the amplification. Alternatively recombinationsites may be added to the primers to enable a recombination reaction. The PCR fragment is either cloned or recombined into a binary vector, preferently under control of a strong constitutive, tissue or developmental specific promoters in a way, that the fragment is introduced twice in the vector as an inverted repeat, the repeats separated by a DNA spacer.

[1137] A fragment of SEQ ID NO: 190 is amplified by PCR. To enable cloning of the PCR product, restriction sites may be added to the primers used for the amplification. Alternatively recombinationsites may be added to the primers to enable a recombination reaction. The PCR fragment is either cloned or recombined into a binary vector, preferently under control of a strong constitutive, tissue or developmental specific promoters in a way, that the fragment is introduced twice in the vector as an inverted repeat, the repeats separated by a DNA spacer.

[1138] A fragment of SEQ ID NO: 410 is amplified by PCR. To enable cloning of the PCR product, restriction sites may be added to the primers used for the amplification. Alternatively recombinationsites may be added to the primers to enable a recombination reaction. The PCR fragment is either cloned or recombined into a binary vector, preferently under control of a strong constitutive, tissue or developmental specific promoters in a way, that the fragment is introduced twice in the vector as an inverted repeat, the repeats separated by a DNA spacer.

[1139] A fragment of SEQ ID NO: 512 is amplified by PCR. To enable cloning of the PCR product, restriction sites may be added to the primers used for the amplification. Alternatively recombinationsites may be added to the primers to enable a recombination reaction. The PCR fragment is either cloned or recombined into a binary vector, preferently under control of a strong constitutive, tissue or developmental specific promoters in a way, that the fragment is introduced twice in the vector as an inverted repeat, the repeats separated by a DNA spacer.

[1140] A fragment of SEQ ID NO: 673 is amplified by PCR. To enable cloning of the PCR product, restriction sites may be added to the primers used for the amplification. Alternatively recombinationsites may be added to the primers to enable a recombination reaction. The PCR fragment is either cloned or recombined into a binary vector, preferently under control of a strong constitutive, tissue or developmental specific promoters in a way, that the fragment is introduced twice in the vector as an inverted repeat, the repeats separated by a DNA spacer.

[1141] A fragment of SEQ ID NO: 729 is amplified by PCR. To enable cloning of the PCR product, restriction sites may be added to the primers used for the amplification. Alternatively recombinationsites may be added to the primers to enable a recombination reaction. The PCR fragment is either cloned or recombined into a binary vector, preferently under control of a strong constitutive, tissue or developmental specific promoters in a way, that the fragment is introduced twice in the vector as an inverted repeat, the repeats separated by a DNA spacer.

[1142] A fragment of SEQ ID NO: 27 is amplified by PCR. To enable cloning of the PCR product, restriction sites may be added to the primers used for the amplification. Alternatively recombinationsites may be added to the primers to enable a recombination reaction. The PCR fragment is either cloned or recombined into a binary vector, preferently under control of a strong constitutive, tissue or developmental specific promoters in a way, that the fragment is introduced twice in the vector as an inverted repeat, the repeats separated by a DNA spacer.

[1143] A fragment of SEQ ID NO: 923 is amplified by PCR. To enable cloning of the PCR product, restriction sites may be added to the primers used for the amplification. Alternatively recombinationsites may be added to the primers to enable a recombination reaction. The PCR fragment is either cloned or recombined into a binary vector, preferently under control of a strong constitutive, tissue or developmental specific promoters in a way, that the fragment is introduced twice in the vector as an inverted repeat, the repeats separated by a DNA spacer.

[1144] A fragment of SEQ ID NO: 1083 is amplified by PCR. To enable cloning of the PCR product, restriction sites may be added to the primers used for the amplification. Alternatively recombinationsites may be added to the primers to enable a recombination reaction. The PCR fragment is either cloned or recombined into a binary vector, preferently under control of a strong constitutive, tissue or developmental specific promoters in a way, that the fragment is introduced twice in the vector as an inverted repeat, the repeats separated by a DNA spacer.

[1145] A fragment of SEQ ID NO: 1385 is amplified by PCR. To enable cloning of the PCR product, restriction sites may be added to the primers used for the amplification. Alternatively recombinationsites may be added to the primers to enable a recombination reaction. The PCR fragment is either cloned or recombined into a binary vector, preferently under control of a strong constitutive, tissue or developmental specific promoters in a way, that the fragment is introduced twice in the vector as an inverted repeat, the repeats separated by a DNA spacer.

[1146] A fragment of SEQ ID NO: 1418 is amplified by PCR. To enable cloning of the PCR product, restriction sites may be added to the primers used for the amplification. Alternatively recombinationsites may be added to the primers to enable a recombination reaction. The PCR fragment is either cloned or recombined into a binary vector, preferently under control of a strong constitutive, tissue or developmental specific promoters in a way, that the fragment is introduced twice in the vector as an inverted repeat, the repeats separated by a DNA spacer.

[1147] A fragment of SEQ ID NO: 1464 is amplified by PCR. To enable cloning of the PCR product, restriction sites may be added to the primers used for the amplification. Alternatively recombinationsites may be added to the primers to enable a recombination reaction. The PCR fragment is either cloned or recombined into a binary vector, preferently under control of a strong constitutive, tissue or developmental specific promoters in a way, that the fragment is introduced twice in the vector as an inverted repeat, the repeats separated by a DNA spacer.

[1148] A fragment of SEQ ID NO: 1551 is amplified by PCR. To enable cloning of the PCR product, restriction sites may be added to the primers used for the amplification. Alternatively recombinationsites may be added to the primers to enable a recombination reaction. The PCR fragment is either cloned or recombined into a binary vector, preferently under control of a strong constitutive, tissue or developmental specific promoters in a way, that the fragment is introduced twice in the vector as an inverted repeat, the repeats separated by a DNA spacer.

[1149] A fragment of SEQ ID NO: 1593 is amplified by PCR. To enable cloning of the PCR product, restriction sites may be added to the primers used for the amplification. Alternatively recombinationsites may be added to the primers to enable a recombination reaction. The PCR fragment is either cloned or recombined into a binary vector, preferently under control of a strong constitutive, tissue or developmental specific promoters in a way, that the fragment is introduced twice in the vector as an inverted repeat, the repeats separated by a DNA spacer.

[1150] A fragment of SEQ ID NO: 813 is amplified by PCR. To enable cloning of the PCR product, restriction sites may be added to the primers used for the amplification. Alternatively recombinationsites may be added to the primers to enable a recombination reaction. The PCR fragment is either cloned or recombined into a binary vector, preferently under control of a strong constitutive, tissue or developmental specific promoters in a way, that the fragment is introduced twice in the vector as an inverted repeat, the repeats separated by a DNA spacer.

[1151] A fragment of SEQ ID NO: 1650 is amplified by PCR. To enable cloning of the PCR product, restriction sites may be added to the primers used for the amplification. Alternatively recombinationsites may be added to the primers to enable a recombination reaction. The PCR fragment is either cloned or recombined into a binary vector, preferently under control of a strong constitutive, tissue or developmental specific promoters in a way, that the fragment is introduced twice in the vector as an inverted repeat, the repeats separated by a DNA spacer.

[1152] The amplification of a fragment of a sequence indicated in a line of column 5 of Table III can be performed using those primers which are indicated in column 7 in the respective same line in the same Table III comprising the extensions 5′-ATAGGTACC-3′ (SEQ ID NO.: 23) or 5′-ATAGTCGAC-3′(SEQ ID NO.: 24). The extensions 5′-ATAGGTACC-3′ (SEQ ID NO.: 23) or 5′-ATAGTCGAC-3′(SEQ ID NO.: 24) contain the Asp718 and Sall restriction enzyme recognition sides respectively for cloning purposes.

[1153] The Oligonucleotides are solved in water to give a concentration of 20 μM. The PCR reaction contains 5 μl Herculase buffer (Stratagene), 0.4 μl dNTPs (25 mM each) (Amersham), 0.5 μl of each primer, 0.5 μl Herculase (Stratagene), 0.5 μl gDNA and 42.6 μl water. The PCR is performed on MJ-Cycler Tetrad (BioZym) with the following programm:

[1154] 4 min 94° C., followed by 30 cycles of 1 min 94° C., 1 min 50° C., 2 min 72° C. followed by 10 min 72° C. and cooling to 25° C.

[1155] The PCR product can be purified using a Kit from Qiagen. The DNA is subsequently digested with Asp718/Sall at 37° C. over night. The fragment can then be cloned into the vector 10xPcUbispacer SEQ ID NO: 3 which is digested with Asp718/Sall. The resulting construct is digested with Xhol/BsrGl and the same Asp718/Sall digested PCR fragment is ligated into this vector. Subsequently, the expression cassette giving rise to BASTA resistance is ligated as Xbal fragment into this vector that is opened with Xbal and dephosphorilized before.

[1156] Construction of Cosuppression constructs for repression of the activity or expression of a gene, e.g. of a gene comprising SEQ ID NO.: 1025

[1157] Construction of Cosuppression constructs for repression of the activity or expression of a gene, e.g. of a gene comprising SEQ ID NO.: 104

[1158] Construction of Cosuppression constructs for repression of the activity or expression of a gene, e.g. of a gene comprising SEQ ID NO.: 190

[1159] Construction of Cosuppression constructs for repression of the activity or expression of a gene, e.g. of a gene comprising SEQ ID NO.: 410

[1160] Construction of Cosuppression constructs for repression of the activity or expression of a gene, e.g. of a gene comprising SEQ ID NO.: 512

[1161] Construction of Cosuppression constructs for repression of the activity or expression of a gene, e.g. of a gene comprising SEQ ID NO.: 673

[1162] Construction of Cosuppression constructs for repression of the activity or expression of a gene, e.g. of a gene comprising SEQ ID NO.: 729

[1163] Construction of Cosuppression constructs for repression of the activity or expression of a gene, e.g. of a gene comprising SEQ ID NO.: 27

[1164] Construction of Cosuppression constructs for repression of the activity or expression of a gene, e.g. of a gene comprising SEQ ID NO.: 923

[1165] Construction of Cosuppression constructs for repression of the activity or expression of a gene, e.g. of a gene comprising SEQ ID NO.: 1083

[1166] Construction of Cosuppression constructs for repression of the activity or expression of a gene, e.g. of a gene comprising SEQ ID NO.: 1385

[1167] Construction of Cosuppression constructs for repression of the activity or expression of a gene, e.g. of a gene comprising SEQ ID NO.: 1418

[1168] Construction of Cosuppression constructs for repression of the activity or expression of a gene, e.g. of a gene comprising SEQ ID NO.: 1464

[1169] Construction of Cosuppression constructs for repression of the activity or expression of a gene, e.g. of a gene comprising SEQ ID NO.: 1551

[1170] Construction of Cosuppression constructs for repression of the activity or expression of a gene, e.g. of a gene comprising SEQ ID NO.: 1593

[1171] Construction of Cosuppression constructs for repression of the activity or expression of a gene, e.g. of a gene comprising SEQ ID NO.: 813

[1172] Construction of Cosuppression constructs for repression of the activity or expression of a gene, e.g. of a gene comprising SEQ ID NO.: 1650

[1173] A fragment of SEQ ID NO: 1025 is amplified by PCR. To enable cloning of the PCR product, restriction sites may be added to the primers used for the amplification. Alternatively recombinationsites may be added to the primers to enable a recombination reaction. The PCR fragment is either cloned or recombined into a binary vector, preferently under control of a strong constitutive, tissue or developmental specific promoters in a way, that the orientation to the promoter is identical to the direction the gen has in its original genomic position.

[1174] A fragment of SEQ ID NO: 104 is amplified by PCR. To enable cloning of the PCR product, restriction sites may be added to the primers used for the amplification. Alternatively recombinationsites may be added to the primers to enable a recombination reaction. The PCR fragment is either cloned or recombined into a binary vector, preferently under control of a strong constitutive, tissue or developmental specific promoters in a way, that the orientation to the promoter is identical to the direction the gen has in its original genomic position.

[1175] A fragment of SEQ ID NO: 190 is amplified by PCR. To enable cloning of the PCR product, restriction sites may be added to the primers used for the amplification. Alternatively recombinationsites may be added to the primers to enable a recombination reaction. The PCR fragment is either cloned or recombined into a binary vector, preferently under control of a strong constitutive, tissue or developmental specific promoters in a way, that the orientation to the promoter is identical to the direction the gen has in its original genomic position.

[1176] A fragment of SEQ ID NO: 410 is amplified by PCR. To enable cloning of the PCR product, restriction sites may be added to the primers used for the amplification. Alternatively recombinationsites may be added to the primers to enable a recombination reaction. The PCR fragment is either cloned or recombined into a binary vector, preferently under control of a strong constitutive, tissue or developmental specific promoters in a way, that the orientation to the promoter is identical to the direction the gen has in its original genomic position.

[1177] A fragment of SEQ ID NO: 512 is amplified by PCR. To enable cloning of the PCR product, restriction sites may be added to the primers used for the amplification. Alternatively recombinationsites may be added to the primers to enable a recombination reaction. The PCR fragment is either cloned or recombined into a binary vector, preferently under control of a strong constitutive, tissue or developmental specific promoters in a way, that the orientation to the promoter is identical to the direction the gen has in its original genomic position.

[1178] A fragment of SEQ ID NO: 673 is amplified by PCR. To enable cloning of the PCR product, restriction sites may be added to the primers used for the amplification. Alternatively recombinationsites may be added to the primers to enable a recombination reaction. The PCR fragment is either cloned or recombined into a binary vector, preferently under control of a strong constitutive, tissue or developmental specific promoters in a way, that the orientation to the promoter is identical to the direction the gen has in its original genomic position.

[1179] A fragment of SEQ ID NO: 729 is amplified by PCR. To enable cloning of the PCR product, restriction sites may be added to the primers used for the amplification. Alternatively recombinationsites may be added to the primers to enable a recombination reaction. The PCR fragment is either cloned or recombined into a binary vector, preferently under control of a strong constitutive, tissue or developmental specific promoters in a way, that the orientation to the promoter is identical to the direction the gen has in its original genomic position.

[1180] A fragment of SEQ ID NO: 27 is amplified by PCR. To enable cloning of the PCR product, restriction sites may be added to the primers used for the amplification. Alternatively recombinationsites may be added to the primers to enable a recombination reaction. The PCR fragment is either cloned or recombined into a binary vector, preferently under control of a strong constitutive, tissue or developmental specific promoters in a way, that the orientation to the promoter is identical to the direction the gen has in its original genomic position.

[1181] A fragment of SEQ ID NO: 923 is amplified by PCR. To enable cloning of the PCR product, restriction sites may be added to the primers used for the amplification. Alternatively recombinationsites may be added to the primers to enable a recombination reaction. The PCR fragment is either cloned or recombined into a binary vector, preferently under control of a strong constitutive, tissue or developmental specific promoters in a way, that the orientation to the promoter is identical to the direction the gen has in its original genomic position.

[1182] A fragment of SEQ ID NO: 1083 is amplified by PCR. To enable cloning of the PCR product, restriction sites may be added to the primers used for the amplification. Alternatively recombinationsites may be added to the primers to enable a recombination reaction. The PCR fragment is either cloned or recombined into a binary vector, preferently under control of a strong constitutive, tissue or developmental specific promoters in a way, that the orientation to the promoter is identical to the direction the gen has in its original genomic position.

[1183] A fragment of SEQ ID NO: 1385 is amplified by PCR. To enable cloning of the PCR product, restriction sites may be added to the primers used for the amplification. Alternatively recombinationsites may be added to the primers to enable a recombination reaction. The PCR fragment is either cloned or recombined into a binary vector, preferently under control of a strong constitutive, tissue or developmental specific promoters in a way, that the orientation to the promoter is identical to the direction the gen has in its original genomic position.

[1184] A fragment of SEQ ID NO: 1418 is amplified by PCR. To enable cloning of the PCR product, restriction sites may be added to the primers used for the amplification. Alternatively recombinationsites may be added to the primers to enable a recombination reaction. The PCR fragment is either cloned or recombined into a binary vector, preferently under control of a strong constitutive, tissue or developmental specific promoters in a way, that the orientation to the promoter is identical to the direction the gen has in its original genomic position.

[1185] A fragment of SEQ ID NO: 1464 is amplified by PCR. To enable cloning of the PCR product, restriction sites may be added to the primers used for the amplification. Alternatively recombinationsites may be added to the primers to enable a recombination reaction. The PCR fragment is either cloned or recombined into a binary vector, preferently under control of a strong constitutive, tissue or developmental specific promoters in a way, that the orientation to the promoter is identical to the direction the gen has in its original genomic position.

[1186] A fragment of SEQ ID NO: 1551 is amplified by PCR. To enable cloning of the PCR product, restriction sites may be added to the primers used for the amplification. Alternatively recombinationsites may be added to the primers to enable a recombination reaction. The PCR fragment is either cloned or recombined into a binary vector, preferently under control of a strong constitutive, tissue or developmental specific promoters in a way, that the orientation to the promoter is identical to the direction the gen has in its original genomic position.

[1187] A fragment of SEQ ID NO: 1593 is amplified by PCR. To enable cloning of the PCR product, restriction sites may be added to the primers used for the amplification. Alternatively recombinationsites may be added to the primers to enable a recombination reaction. The PCR fragment is either cloned or recombined into a binary vector, preferently under control of a strong constitutive, tissue or developmental specific promoters in a way, that the orientation to the promoter is identical to the direction the gen has in its original genomic position.

[1188] A fragment of SEQ ID NO: 813 is amplified by PCR. To enable cloning of the PCR product, restriction sites may be added to the primers used for the amplification. Alternatively recombinationsites may be added to the primers to enable a recombination reaction. The PCR fragment is either cloned or recombined into a binary vector, preferently under control of a strong constitutive, tissue or developmental specific promoters in a way, that the orientation to the promoter is identical to the direction the gen has in its original genomic position.

[1189] A fragment of SEQ ID NO: 1650 is amplified by PCR. To enable cloning of the PCR product, restriction sites may be added to the primers used for the amplification. Alternatively recombinationsites may be added to the primers to enable a recombination reaction. The PCR fragment is either cloned or recombined into a binary vector, preferently under control of a strong constitutive, tissue or developmental specific promoters in a way, that the orientation to the promoter is identical to the direction the gen has in its original genomic position.

[1190] The amplification of the fragment of the sequences indicated in a line of column 5 of Table III is performed using those primers, which are indicated in column 7 of the respective same line in the same Table III, which comprises the extensions 5′-ATACCATGG-3′ (SEQ ID NO.: 25) or 5′-ATATTAATTAA-3′ (SEQ ID NO.: 26). The extensions 5′-ATACCATGG-3′ (SEQ ID NO.: 25) or 5′-ATATTAATTAA-3′ (SEQ ID NO.: 26), contain the Ncol and Pacl restriction enzyme recognition sides respectively for cloning purposes

[1191] The Oligonucleotides are solved in water to give a concentration of 20 μM. The PCR reaction contains 5 μl Herculase buffer (Stratagene), 0.4 μl dNTPs (25 mM each) (Amersham), 0.5 μl of each p, 0.5 μl Herculase (Stratagene), 0.5 μl gDNA and 42.6 μl water. The PCR is performed on MJ-Cycler Tetrad (BioZym) with the following programm:

[1192] 4 min 94° C., followed by 30 cycles of 1 min 94° C., 1 min 50° C., 2 min 72° C. followed by 10 min 72° C. and cooling to 25° C.

[1193] The PCR product is purified using a Kit from Qiagen. The DNA is subsequently digested with Ncol/Pacl at 37° C. over night. The fragment can then be cloned into the vector 1bxPcUbicolic SEQ ID NO: 2 which is digested with Ncol/Pacl.

[1194] Reducing the activity or expression of a gene, e.g. of a gene comprising SEQ ID NO.: 1025 by artificial transcription factors

[1195] Reducing the activity or expression of a gene, e.g. of a gene comprising SEQ ID NO.: 104 by artificial transcription factors

[1196] Reducing the activity or expression of a gene, e.g. of a gene comprising SEQ ID NO.: 190 by artificial transcription factors

[1197] Reducing the activity or expression of a gene, e.g. of a gene comprising SEQ ID NO.: 410 by artificial transcription factors

[1198] Reducing the activity or expression of a gene, e.g. of a gene comprising SEQ ID NO.: 512 by artificial transcription factors

[1199] Reducing the activity or expression of a gene, e.g. of a gene comprising SEQ ID NO.: 673 by artificial transcription factors

[1200] Reducing the activity or expression of a gene, e.g. of a gene comprising SEQ ID NO.: 729 by artificial transcription factors

[1201] Reducing the activity or expression of a gene, e.g. of a gene comprising SEQ ID NO.: 27 by artificial transcription factors

[1202] Reducing the activity or expression of a gene, e.g. of a gene comprising SEQ ID NO.: 923 by artificial transcription factors

[1203] Reducing the activity or expression of a gene, e.g. of a gene comprising SEQ ID NO.: 1083 by artificial transcription factors

[1204] Reducing the activity or expression of a gene, e.g. of a gene comprising SEQ ID NO.: 1385 by artificial transcription factors

[1205] Reducing the activity or expression of a gene, e.g. of a gene comprising SEQ ID NO.: 1418 by artificial transcription factors

[1206] Reducing the activity or expression of a gene, e.g. of a gene comprising SEQ ID NO.: 1464 by artificial transcription factors

[1207] Reducing the activity or expression of a gene, e.g. of a gene comprising SEQ ID NO.: 1551 by artificial transcription factors

[1208] Reducing the activity or expression of a gene, e.g. of a gene comprising SEQ ID NO.: 1593 by artificial transcription factors

[1209] Reducing the activity or expression of a gene, e.g. of a gene comprising SEQ ID NO.: 813 by artificial transcription factors

[1210] Reducing the activity or expression of a gene, e.g. of a gene comprising SEQ ID NO.: 1650 by artificial transcription factors

[1211] A gene and its homologous ORFs in other species may also be down regulated by introducing a synthetic specific repressor. For this purpose, a gene for a chimeric zinc finger protein, which binds to a specific region in the regulatory or coding region of the genes of interests or its homologs in other species is constructed. The artificial zinc finger protein comprises a specific DNA-binding domain consting for example of zinc finger and optional an repression like the EAR domain (Hiratsu et al., 2003. Plant J. 34(5), 733-739 Dominant repression of target genes by chimeric repressors that include the EAR motif, a repression domain, in Arabidopsis.)

[1212] Expression of this chimeric repressor for example in plants then results in specific repression of the target gene or of its homologs in other plant species lead to increased metabolite production. The experimental details expecially about the desing and construction of specific zinc finger domains may be carried out as described, or WO 01/52620 or Ordiz M I, (Proc. Natl. Acad. Sci. USA, 2002, Vol. 99, Issue 20, 13290) or Guan, (Proc. Natl. Acad. Sci. USA, 2002, Vol. 99, Issue 20, 13296).

[1213] Engineering ryegrass plants by repressing the activity or expression of a gene, e.g. of a gene homolog to a gene comprising SEQ ID NO.: 1025 in ryegrass

[1214] Engineering ryegrass plants by repressing the activity or expression of a gene, e.g. of a gene homolog to a gene comprising SEQ ID NO.: 104 in ryegrass

[1215] Engineering ryegrass plants by repressing the activity or expression of a gene, e.g. of a gene homolog to a gene comprising SEQ ID NO.: 190 in ryegrass

[1216] Engineering ryegrass plants by repressing the activity or expression of a gene, e.g. of a gene homolog to a gene comprising SEQ ID NO.: 410 in ryegrass

[1217] Engineering ryegrass plants by repressing the activity or expression of a gene, e.g. of a gene homolog to a gene comprising SEQ ID NO.: 512 in ryegrass

[1218] Engineering ryegrass plants by repressing the activity or expression of a gene, e.g. of a gene homolog to a gene comprising SEQ ID NO.: 673 in ryegrass

[1219] Engineering ryegrass plants by repressing the activity or expression of a gene, e.g. of a gene homolog to a gene comprising SEQ ID NO.: 729 in ryegrass

[1220] Engineering ryegrass plants by repressing the activity or expression of a gene, e.g. of a gene homolog to a gene comprising SEQ ID NO.: 27 in ryegrass

[1221] Engineering ryegrass plants by repressing the activity or expression of a gene, e.g. of a gene homolog to a gene comprising SEQ ID NO.: 923 in ryegrass

[1222] Engineering ryegrass plants by repressing the activity or expression of a gene, e.g. of a gene homolog to a gene comprising SEQ ID NO.: 1083 in ryegrass

[1223] Engineering ryegrass plants by repressing the activity or expression of a gene, e.g. of a gene homolog to a gene comprising SEQ ID NO.: 1385 in ryegrass

[1224] Engineering ryegrass plants by repressing the activity or expression of a gene, e.g. of a gene homolog to a gene comprising SEQ ID NO.: 1418 in ryegrass

[1225] Engineering ryegrass plants by repressing the activity or expression of a gene, e.g. of a gene homolog to a gene comprising SEQ ID NO.: 1464 in ryegrass

[1226] Engineering ryegrass plants by repressing the activity or expression of a gene, e.g. of a gene homolog to a gene comprising SEQ ID NO.: 1551 in ryegrass

[1227] Engineering ryegrass plants by repressing the activity or expression of a gene, e.g. of a gene homolog to a gene comprising SEQ ID NO.: 1593 in ryegrass

[1228] Engineering ryegrass plants by repressing the activity or expression of a gene, e.g. of a gene homolog to a gene comprising SEQ ID NO.: 813 in ryegrass

[1229] Engineering ryegrass plants by repressing the activity or expression of a gene, e.g. of a gene homolog to a gene comprising SEQ ID NO.: 1650 in ryegrass

[1230] Seeds of several different ryegrass varieties can be used as explant sources for transformation, including the commercial variety Gunne available from Svalof Weibull Seed Company or the variety Affinity. Seeds are surface-sterilized sequentially with 1% Tween-20 for 1 minute, 100% bleach for 60 minutes, 3 rinses with 5 minutes each with de-ionized and distilled H₂O, and then germinated for 3-4 days on moist, sterile filter paper in the dark. Seedlings are further sterilized for 1 minute with 1% Tween-20, 5 minutes with 75% bleach, and rinsed 3 times with ddH₂O, 5 min each.

[1231] Surface-sterilized seeds are placed on the callus induction medium containing Murashige and Skoog basal salts and vitamins, 20 g/l sucrose, 150 mg/l asparagine, 500 mg/l casein hydrolysate, 3 g/l Phytagel, 10 mg/l BAP, and 5 mg/l dicamba. Plates are incubated in the dark at 25° C. for 4 weeks for seed germination and embryogenic callus induction.

[1232] After 4 weeks on the callus induction medium, the shoots and roots of the seedlings are trimmed away, the callus is transferred to fresh media, is maintained in culture for another 4 weeks, and is then transferred to MSO medium in light for 2 weeks. Several pieces of callus (11-17 weeks old) are either strained through a 10 mesh sieve and put onto callus induction medium, or are cultured in 100 ml of liquid ryegrass callus induction media (same medium as for callus induction with agar) in a 250 ml flask. The flask is wrapped in foil and shaken at 175 rpm in the dark at 23° C. for 1 week. Sieving the liquid culture with a 40-mesh sieve is collected the cells. The fraction collected on the sieve is plated and is cultured on solid ryegrass callus induction medium for 1 week in the dark at 25° C. The callus is then transferred to and is cultured on MS medium containing 1% sucrose for 2 weeks.

[1233] Transformation can be accomplished with either Agrobacterium or with particle bombardment methods. An expression vector is created containing a constitutive or otherwise appropiate plant promoter and the antisense, RNAi, snRNA, dsRNA, siRNA, miRNA, ta-siRNA, cosuppression construct, recombination construct or ribozyme molecule, or the viral nucleic acid molecule, nucleic acid construct in a pUC vector. The plasmid DNA is prepared from E. coli cells using with Qiagen kit according to manufacturer's instruction. Approximately 2 g of embryogenic callus is spread in the center of a sterile filter paper in a Petri dish. An aliquot of liquid MSO with 10 g/l sucrose is added to the filter paper. Gold particles (1.0 μm in size) are coated with plasmid DNA according to method of Sanford et al., 1993 and are delivered to the embryogenic callus with the following parameters: 500 μg particles and 2 μg DNA per shot, 1300 psi and a target distance of 8.5 cm from stopping plate to plate of callus and 1 shot per plate of callus.

[1234] After the bombardment, calli are transferred back to the fresh callus development medium and maintained in the dark at room temperature for a 1-week period. The callus is then transferred to growth conditions in the light at 25° C. to initiate embryo differentiation with the appropriate selection agent, e.g. 250 nM Arsenal, 5 mg/l PPT or 50 mg/L Kanamycin. Shoots resistant to the selection agent are appearing and once rooted are transferred to soil.

[1235] Samples of the primary transgenic plants (T0) are analyzed by PCR to confirm the presence of T-DNA. These results are confirmed by Southern hybridization in which DNA is electrophoresed on a 1% agarose gel and transferred to a positively charged nylon membrane (Roche Diagnostics). The PCR DIG Probe Synthesis Kit (Roche Diagnostics) is used to prepare a digoxigenin-labelled probe by PCR, and used as recommended by the manufacturer. Furthermore the primary transgenic plants (T0) are analyzed for repressed expression of the gene to be repressed by standard methods such as Northern blots or quantitative RTPCR.

[1236] Transgenic T0 ryegrass plants are propagated vegetatively by excising tillers. The transplanted tillers are maintained in the greenhouse for 2 months until well established. The shoots are defoliated and allowed to grow for 2 weeks.

[1237] Engineering soybean plants by repressing the activity or expression of a gene, e.g. of a gene homolog to a gene comprising SEQ ID NO.: 1025 in soybean

[1238] Engineering soybean plants by repressing the activity or expression of a gene, e.g. of a gene homolog to a gene comprising SEQ ID NO.: 104 in soybean

[1239] Engineering soybean plants by repressing the activity or expression of a gene, e.g. of a gene homolog to a gene comprising SEQ ID NO.: 190 in soybean

[1240] Engineering soybean plants by repressing the activity or expression of a gene, e.g. of a gene homolog to a gene comprising SEQ ID NO.: 410 in soybean

[1241] Engineering soybean plants by repressing the activity or expression of a gene, e.g. of a gene homolog to a gene comprising SEQ ID NO.: 512 in soybean

[1242] Engineering soybean plants by repressing the activity or expression of a gene, e.g. of a gene homolog to a gene comprising SEQ ID NO.: 673 in soybean

[1243] Engineering soybean plants by repressing the activity or expression of a gene, e.g. of a gene homolog to a gene comprising SEQ ID NO.: 729 in soybean

[1244] Engineering soybean plants by repressing the activity or expression of a gene, e.g. of a gene homolog to a gene comprising SEQ ID NO.: 27 in soybean

[1245] Engineering soybean plants by repressing the activity or expression of a gene, e.g. of a gene homolog to a gene comprising SEQ ID NO.: 923 in soybean

[1246] Engineering soybean plants by repressing the activity or expression of a gene, e.g. of a gene homolog to a gene comprising SEQ ID NO.: 1083 in soybean

[1247] Engineering soybean plants by repressing the activity or expression of a gene, e.g. of a gene homolog to a gene comprising SEQ ID NO.: 1385 in soybean

[1248] Engineering soybean plants by repressing the activity or expression of a gene, e.g. of a gene homolog to a gene comprising SEQ ID NO.: 1418 in soybean

[1249] Engineering soybean plants by repressing the activity or expression of a gene, e.g. of a gene homolog to a gene comprising SEQ ID NO.: 1464 in soybean

[1250] Engineering soybean plants by repressing the activity or expression of a gene, e.g. of a gene homolog to a gene comprising SEQ ID NO.: 1551 in soybean

[1251] Engineering soybean plants by repressing the activity or expression of a gene, e.g. of a gene homolog to a gene comprising SEQ ID NO.: 1593 in soybean

[1252] Engineering soybean plants by repressing the activity or expression of a gene, e.g. of a gene homolog to a gene comprising SEQ ID NO.: 813 in soybean

[1253] Engineering soybean plants by repressing the activity or expression of a gene, e.g. of a gene homolog to a gene comprising SEQ ID NO.: 1650 in soybean

[1254] Soybean can be transformed according to the following modification of the method described in the Texas A&M patent U.S. Pat. No. 5,164,310. Several commercial soybean varieties are amenable to transformation by this method. The cultivar Jack (available from the Illinois Seed Foundation) is commonly used for transformation. Seeds are sterilized by immersion in 70% (v/v) ethanol for 6 min and in 25% commercial bleach (NaOCl) supplemented with 0.1% (v/v) Tween for 20 min, followed by rinsing 4 times with sterile double distilled water. Removing the radicle, hypocotyl and one cotyledon from each seedling propagates seven-day seedlings. Then, the epicotyl with one cotyledon is transferred to fresh germination media in petri dishes and incubated at 25° C. under a 16-hr photoperiod (approx. 100 μE-m-2s-1) for three weeks. Axillary nodes (approx. 4 mm in length) are cut from 3 to 4 week-old plants. Axillary nodes are excised and incubated in Agrobacterium LBA4404 culture.

[1255] Many different binary vector systems have been described for plant transformation (e.g. An, G. in Agrobacterium Protocols. Methods in Molecular Biology vol 44, pp 47-62, Gartland K M A and M R Davey eds. Humana Press, Totowa, N.J.). Many are based on the vector pBIN19 described by Bevan (Nucleic Acid Research. 1984. 12:8711-8721) that includes a plant gene expression cassette flanked by the left and right border sequences from the Ti plasmid of Agrobacterium tumefaciens. A plant gene expression cassette consists of at least two genes—a selection marker gene and a plant promoter regulating the transcription of the antisense, RNAi, snRNA, dsRNA, siRNA, miRNA, ta-siRNA, cosuppression construct, or ribozyme molecule, or the viral nucleic acid molecule. Various selection marker genes can be used as described above, including the Arabidopsis gene encoding a mutated acetohydroxy acid synthase (AHAS) enzyme (U.S. Pat. Nos. 5,767,366 and 6,225,105). Similarly, various promoters can be used to regulate the repression cassette to provide constitutive, developmental, tissue or environmental repression of gene transcription as described above. In this example, the 34S promoter (GenBank Accession numbers M59930 and X16673) is used to provide constitutive repression of the repression cassette.

[1256] After the co-cultivation treatment, the explants are washed and transferred to selection media supplemented with 500 mg/L timentin. Shoots are excised and placed on a shoot elongation medium. Shoots longer than 1 cm are placed on rooting medium for two to four weeks prior to transplanting to soil.

[1257] The primary transgenic plants (TO) are analyzed by PCR to confirm the presence of T-DNA. These results are confirmed by Southern hybridization in which DNA is electrophoresed on a 1% agarose gel and transferred to a positively charged nylon membrane (Roche Diagnostics). The PCR DIG Probe Synthesis Kit (Roche Diagnostics) is used to prepare a digoxigenin-labelled probe by PCR, and is used as recommended by the manufacturer. Furthermore the primary transgenic plants (T0) are analyzed for repressed expression of the gene to be repressed by standard methods such as Northern blots or quantitative RTPCR.

[1258] Engineering corn plants by repressing the activity or expression of a gene, e.g. of a gene homolog to a gene comprising SEQ ID NO.: 1025 in corn

[1259] Engineering corn plants by repressing the activity or expression of a gene, e.g. of a gene homolog to a gene comprising SEQ ID NO.: 104 in corn

[1260] Engineering corn plants by repressing the activity or expression of a gene, e.g. of a gene homolog to a gene comprising SEQ ID NO.: 190 in corn

[1261] Engineering corn plants by repressing the activity or expression of a gene, e.g. of a gene homolog to a gene comprising SEQ ID NO.: 410 in corn

[1262] Engineering corn plants by repressing the activity or expression of a gene, e.g. of a gene homolog to a gene comprising SEQ ID NO.: 512 in corn

[1263] Engineering corn plants by repressing the activity or expression of a gene, e.g. of a gene homolog to a gene comprising SEQ ID NO.: 673 in corn

[1264] Engineering corn plants by repressing the activity or expression of a gene, e.g. of a gene homolog to a gene comprising SEQ ID NO.: 729 in corn

[1265] Engineering corn plants by repressing the activity or expression of a gene, e.g. of a gene homolog to a gene comprising SEQ ID NO.: 27 in corn

[1266] Engineering corn plants by repressing the activity or expression of a gene, e.g. of a gene homolog to a gene comprising SEQ ID NO.: 923 in corn

[1267] Engineering corn plants by repressing the activity or expression of a gene, e.g. of a gene homolog to a gene comprising SEQ ID NO.: 1083 in corn

[1268] Engineering corn plants by repressing the activity or expression of a gene, e.g. of a gene homolog to a gene comprising SEQ ID NO.: 1385 in corn

[1269] Engineering corn plants by repressing the activity or expression of a gene, e.g. of a gene homolog to a gene comprising SEQ ID NO.: 1418 in corn

[1270] Engineering corn plants by repressing the activity or expression of a gene, e.g. of a gene homolog to a gene comprising SEQ ID NO.: 1464 in corn

[1271] Engineering corn plants by repressing the activity or expression of a gene, e.g. of a gene homolog to a gene comprising SEQ ID NO.: 1551 in corn

[1272] Engineering corn plants by repressing the activity or expression of a gene, e.g. of a gene homolog to a gene comprising SEQ ID NO.: 1593 in corn

[1273] Engineering corn plants by repressing the activity or expression of a gene, e.g. of a gene homolog to a gene comprising SEQ ID NO.: 813 in corn

[1274] Engineering corn plants by repressing the activity or expression of a gene, e.g. of a gene homolog to a gene comprising SEQ ID NO.: 1650 in corn

[1275] Transformation of maize (Zea Mays L.) is performed with a modification of the method described by Ishida et al. (1996. Nature Biotech 14745-50). Transformation is genotype-dependent in corn and only specific genotypes are amenable to transformation and regeneration. The inbred line A188 (University of Minnesota) or hybrids with A188 as a parent are good sources of donor material for transformation (Fromm et al. 1990 Biotech 8:833-839), but other genotypes can be used successfully as well. Ears are harvested from corn plants at approximately 11 days after pollination (DAP) when the length of immature embryos is about 1 to 1.2 mm. Immature embryos are cocultivated with Agrobacterium tumefaciens that carry “super binary” vectors and transgenic plants are recovered through organogenesis. The super binary vector system of Japan Tobacco is described in WO patents WO94/00977 and WO95/06722. Vectors can be constructed as described. Various selection marker genes can be used including the maize gene encoding a mutated acetohydroxy acid synthase (AHAS) enzyme (U.S. Pat. No. 6,025,541). Similarly, various promoters can be used to regulate the repression cassette to provide constitutive, developmental, tissue or environmental expression of the antisense, RNAi, snRNA, dsRNA, siRNA, miRNA, ta-siRNA, cosuppression construct, or ribozyme molecule, or the viral nucleic acid molecule,. In this example, the 34S promoter (GenBank Accession numbers M59930 and X16673) is used to provide constitutive expression of the repression cassette.

[1276] Excised embryos are grown on callus induction medium, then maize regeneration medium, containing imidazolinone as a selection agent. The Petri plates are incubated in the light at 25° C. for 2 to 3 weeks, or until shoots develop. The green shoots are transferred from each embryo to maize rooting medium and incubated at 25° C. for 2 to 3 weeks, until roots develop. The rooted shoots are transplanted to soil in the greenhouse. T1 seeds are produced from plants that exhibit tolerance to the imidazolinone herbicides and which show repressed expression of the gene to be repressed. Such analysis can be done by standard methods such as Northern blots or quantitative RTPCR.

[1277] The T1 generation of single locus insertions of the T-DNA can segregate for the transgene in a 3:1 ratio. Those progeny containing one or two copies of the transgene are tolerant of the imidazolinone herbicide. Homozygous T2 plants can exhibit similar phenotypes as the T1 plants. Hybrid plants (F1 progeny) of homozygous transgenic plants and non-transgenic plants can also exhibited increased similar phenotyps.

[1278] Engineering wheat plants by repressing the activity or expression of a gene, e.g. of a gene homolog to a gene comprising SEQ ID NO.: 1025 in wheat

[1279] Engineering wheat plants by repressing the activity or expression of a gene, e.g. of a gene homolog to a gene comprising SEQ ID NO.: 104 in wheat

[1280] Engineering wheat plants by repressing the activity or expression of a gene, e.g. of a gene homolog to a gene comprising SEQ ID NO.: 190 in wheat

[1281] Engineering wheat plants by repressing the activity or expression of a gene, e.g. of a gene homolog to a gene comprising SEQ ID NO.: 410 in wheat

[1282] Engineering wheat plants by repressing the activity or expression of a gene, e.g. of a gene homolog to a gene comprising SEQ ID NO.: 512 in wheat

[1283] Engineering wheat plants by repressing the activity or expression of a gene, e.g. of a gene homolog to a gene comprising SEQ ID NO.: 673 in wheat

[1284] Engineering wheat plants by repressing the activity or expression of a gene, e.g. of a gene homolog to a gene comprising SEQ ID NO.: 729 in wheat

[1285] Engineering wheat plants by repressing the activity or expression of a gene, e.g. of a gene homolog to a gene comprising SEQ ID NO.: 27 in wheat

[1286] Engineering wheat plants by repressing the activity or expression of a gene, e.g. of a gene homolog to a gene comprising SEQ ID NO.: 923 in wheat

[1287] Engineering wheat plants by repressing the activity or expression of a gene, e.g. of a gene homolog to a gene comprising SEQ ID NO.: 1083 in wheat

[1288] Engineering wheat plants by repressing the activity or expression of a gene, e.g. of a gene homolog to a gene comprising SEQ ID NO.: 1385 in wheat

[1289] Engineering wheat plants by repressing the activity or expression of a gene, e.g. of a gene homolog to a gene comprising SEQ ID NO.: 1418 in wheat

[1290] Engineering wheat plants by repressing the activity or expression of a gene, e.g.

[1291] of a gene homolog to a gene comprising SEQ ID NO.: 1464 in wheat

[1292] Engineering wheat plants by repressing the activity or expression of a gene, e.g. of a gene homolog to a gene comprising SEQ ID NO.: 1551 in wheat

[1293] Engineering wheat plants by repressing the activity or expression of a gene, e.g. of a gene homolog to a gene comprising SEQ ID NO.: 1593 in wheat

[1294] Engineering wheat plants by repressing the activity or expression of a gene, e.g. of a gene homolog to a gene comprising SEQ ID NO.: 813 in wheat

[1295] Engineering wheat plants by repressing the activity or expression of a gene, e.g. of a gene homolog to a gene comprising SEQ ID NO.: 1650 in wheat

[1296] Transformation of wheat is performed with the method described by Ishida et al. (1996 Nature Biotech. 14745-50). The cultivar Bobwhite (available from CYMMIT, Mexico) is commonly used in transformation. Immature embryos are cocultivated with Agrobacterium tumefaciens that carry “super binary” vectors, and transgenic plants are recovered through organogenesis. The super binary vector system of Japan Tobacco is described in WO patents WO94/00977 and WO95/06722. Vectors were constructed as described. Various selection marker genes can be used including the maize gene encoding a mutated acetohydroxy acid synthase (AHAS) enzyme (U.S. Pat. No. 6,025,541). Similarly, various promoters can be used to regulate the repression cassette to provide constitutive, developmental, tissue or environmental regulation of the antisense, RNAi, snRNA, dsRNA, siRNA, miRNA, ta-siRNA, cosuppression construct, ribozyme molecule, or the viral nucleic acid molecule. In this example, the 34S promoter (GenBank Accession numbers M59930 and X16673) can be used to provide constitutive expression of the repression cassette.

[1297] After incubation with Agrobacterium, the embryos are grown on callus induction medium, then regeneration medium, containing imidazolinone as a selection agent. The Petri plates are incubated in the light at 25° C. for 2 to 3 weeks, or until shoots develop. The green shoots are transferred from each embryo to rooting medium and incubated at 25° C. for 2 to 3 weeks, until roots develop. The rooted shoots are transplanted to soil in the greenhouse. T1 seeds are produced from plants that exhibit tolerance to the imidazolinone herbicides and which show repressed expression of the gene to be repressed. Such analysis can be done by standard methods such as Northern blots or quantitative RTPCR.

[1298] The T1 generation of single locus insertions of the T-DNA can segregate for the transgene in a 3:1 ratio. Those progeny containing one or two copies of the transgene are tolerant of the imidazolinone herbicide. Homozygous T2 plants exhibited similar phenotypes.

[1299] Engineering Rapeseed/Canola plants by repressing the activity or expression of a gene, e.g. of a gene homolog to a gene comprising SEQ ID NO.: 1025 in rapeseed/canola plants

[1300] Engineering Rapeseed/Canola plants by repressing the activity or expression of a gene, e.g. of a gene homolog to a gene comprising SEQ ID NO.: 104 in rapeseed/canola plants

[1301] Engineering Rapeseed/Canola plants by repressing the activity or expression of a gene, e.g. of a gene homolog to a gene comprising SEQ ID NO.: 190 in rapeseed/canola plants

[1302] Engineering Rapeseed/Canola plants by repressing the activity or expression of a gene, e.g. of a gene homolog to a gene comprising SEQ ID NO.: 410 in rapeseed/canola plants

[1303] Engineering Rapeseed/Canola plants by repressing the activity or expression of a gene, e.g. of a gene homolog to a gene comprising SEQ ID NO.: 512 in rapeseed/canola plants

[1304] Engineering Rapeseed/Canola plants by repressing the activity or expression of a gene, e.g. of a gene homolog to a gene comprising SEQ ID NO.: 673 in rapeseed/canola plants

[1305] Engineering Rapeseed/Canola plants by repressing the activity or expression of a gene, e.g. of a gene homolog to a gene comprising SEQ ID NO.: 729 in rapeseed/canola plants

[1306] Engineering Rapeseed/Canola plants by repressing the activity or expression of a gene, e.g. of a gene homolog to a gene comprising SEQ ID NO.: 27 in rapeseed/canola plants

[1307] Engineering Rapeseed/Canola plants by repressing the activity or expression of a gene, e.g. of a gene homolog to a gene comprising SEQ ID NO.: 923 in rapeseed/canola plants

[1308] Engineering Rapeseed/Canola plants by repressing the activity or expression of a gene, e.g. of a gene homolog to a gene comprising SEQ ID NO.: 1083 in rapeseed/canola plants

[1309] Engineering Rapeseed/Canola plants by repressing the activity or expression of a gene, e.g. of a gene homolog to a gene comprising SEQ ID NO.: 1385 in rapeseed/canola plants

[1310] Engineering Rapeseed/Canola plants by repressing the activity or expression of a gene, e.g. of a gene homolog to a gene comprising SEQ ID NO.: 1418 in rapeseed/canola plants

[1311] Engineering Rapeseed/Canola plants by repressing the activity or expression of a gene, e.g. of a gene homolog to a gene comprising SEQ ID NO.: 1464 in rapeseed/canola plants

[1312] Engineering Rapeseed/Canola plants by repressing the activity or expression of a gene, e.g. of a gene homolog to a gene comprising SEQ ID NO.: 1551 in rapeseed/canola plants

[1313] Engineering Rapeseed/Canola plants by repressing the activity or expression of a gene, e.g. of a gene homolog to a gene comprising SEQ ID NO.: 1593 in rapeseed/canola plants

[1314] Engineering Rapeseed/Canola plants by repressing the activity or expression of a gene, e.g. of a gene homolog to a gene comprising SEQ ID NO.: 813 in rapeseed/canola plants

[1315] Engineering Rapeseed/Canola plants by repressing the activity or expression of a gene, e.g. of a gene homolog to a gene comprising SEQ ID NO.: 1650 in rapeseed/canola plants

[1316] Cotyledonary petioles and hypocotyls of 5-6 day-old young seedlings are used as explants for tissue culture and transformed according to Babic et al. (1998, Plant Cell Rep 17: 183-188). The commercial cultivar Westar (Agriculture Canada) is the standard variety used for transformation, but other varieties can be used.

[1317] Agrobacterium tumefaciens LBA4404 containing a binary vector are used for canola transformation. Many different binary vector systems have been described for plant transformation (e.g. An, G. in Agrobacterium Protocols. Methods in Molecular Biology vol 44, pp 47-62, Gartland K M A and M R Davey eds. Humana Press, Totowa, N.J.). Many are based on the vector pBIN19 described by Bevan (Nucleic Acid Research. 1984. 12:8711-8721) that includes a plant gene expression cassette flanked by the left and right border sequences from the Ti plasmid of Agrobacterium tumefaciens. A plant gene expression cassette consists of at least two genes—a selection marker gene and a plant promoter regulating the transcription of the repression cassette of the trait gene. Various selection marker genes can be used including the Arabidopsis gene encoding a mutated acetohydroxy acid synthase (AHAS) enzyme (U.S. Pat. Nos. 5,767,3666 and 6,225,105). Similarly, various promoters can be used to regulate the repression cassette to provide constitutive, developmental, tissue or environmental regulation of the antisense, RNAi, snRNA, dsRNA, siRNA, miRNA, ta-siRNA, cosuppression construct, ribozyme molecule, or the viral nucleic acid molecule. In this example, the 34S promoter (GenBank Accession numbers M59930 and X16673) can be used to provide constitutive expression of the repression cassette.

[1318] Canola seeds are surface-sterilized in 70% ethanol for 2 min., and then in 30% Clorox with a drop of Tween-20 for 10 min, followed by three rinses with sterilized distilled water. Seeds are then germinated in vitro 5 days on half strength MS medium without hormones, 1% sucrose, 0.7% Phytagar at 23° C., 16 hr. light. The cotyledon petiole explants with the cotyledon attached are excised from the in vitro seedlings, and are inoculated with Agrobacterium by dipping the cut end of the petiole explant into the bacterial suspension. The explants are then cultured for 2 days on MSBAP-3 medium containing 3 mg/l BAP, 3% sucrose, 0.7% Phytagar at 23° C., 16 hr light. After two days of co-cultivation with Agrobacterium, the petiole explants are transferred to MSBAP-3 medium containing 3 mg/l BAP, cefotaxime, carbenicillin, or timentin (300 mg/l) for 7 days, and then cultured on MSBAP-3 medium with cefotaxime, carbenicillin, or timentin and selection agent until shoot regeneration. When the shoots are 5 to 10 mm in length, they are cut and transferred to shoot elongation medium (MSBAP-0.5, containing 0.5 mg/l BAP). Shoots of about 2 cm in length are transferred to the rooting medium (MS0) for root induction.

[1319] Samples of the primary transgenic plants (T0) are analyzed by PCR to confirm the presence of T-DNA. These results are confirmed by Southern hybridization in which DNA is electrophoresed on a 1% agarose gel and are transferred to a positively charged nylon membrane (Roche Diagnostics). The PCR DIG Probe Synthesis Kit (Roche Diagnostics) is used to prepare a digoxigenin-labelled probe by PCR, and used as recommended by the manufacturer. Furthermore the primary transgenic plants (T0) are analyzed for repressed expression of the gene to be repressed by standard methods such as Northern blots or quantitative RTPCR.

[1320] Engineering alfalfa plants by repressing the activity or expression of a gene, e.g. of a gene homolog to a gene comprising SEQ ID NO.: 1025 in alfalfa

[1321] Engineering alfalfa plants by repressing the activity or expression of a gene, e.g. of a gene homolog to a gene comprising SEQ ID NO.: 104 in alfalfa

[1322] Engineering alfalfa plants by repressing the activity or expression of a gene, e.g. of a gene homolog to a gene comprising SEQ ID NO.: 190 in alfalfa

[1323] Engineering alfalfa plants by repressing the activity or expression of a gene, e.g. of a gene homolog to a gene comprising SEQ ID NO.: 410 in alfalfa

[1324] Engineering alfalfa plants by repressing the activity or expression of a gene, e.g. of a gene homolog to a gene comprising SEQ ID NO.: 512 in alfalfa

[1325] Engineering alfalfa plants by repressing the activity or expression of a gene, e.g. of a gene homolog to a gene comprising SEQ ID NO.: 673 in alfalfa

[1326] Engineering alfalfa plants by repressing the activity or expression of a gene, e.g. of a gene homolog to a gene comprising SEQ ID NO.: 729 in alfalfa

[1327] Engineering alfalfa plants by repressing the activity or expression of a gene, e.g. of a gene homolog to a gene comprising SEQ ID NO.: 27 in alfalfa

[1328] Engineering alfalfa plants by repressing the activity or expression of a gene, e.g. of a gene homolog to a gene comprising SEQ ID NO.: 923 in alfalfa

[1329] Engineering alfalfa plants by repressing the activity or expression of a gene, e.g. of a gene homolog to a gene comprising SEQ ID NO.: 1083 in alfalfa

[1330] Engineering alfalfa plants by repressing the activity or expression of a gene, e.g. of a gene homolog to a gene comprising SEQ ID NO.: 1385 in alfalfa

[1331] Engineering alfalfa plants by repressing the activity or expression of a gene, e.g. of a gene homolog to a gene comprising SEQ ID NO.: 1418 in alfalfa

[1332] Engineering alfalfa plants by repressing the activity or expression of a gene, e.g. of a gene homolog to a gene comprising SEQ ID NO.: 1464 in alfalfa

[1333] Engineering alfalfa plants by repressing the activity or expression of a gene, e.g. of a gene homolog to a gene comprising SEQ ID NO.: 1551 in alfalfa

[1334] Engineering alfalfa plants by repressing the activity or expression of a gene, e.g.

[1335] of a gene homolog to a gene comprising SEQ ID NO.: 1593 in alfalfa

[1336] Engineering alfalfa plants by repressing the activity or expression of a gene, e.g. of a gene homolog to a gene comprising SEQ ID NO.: 813 in alfalfa

[1337] Engineering alfalfa plants by repressing the activity or expression of a gene, e.g. of a gene homolog to a gene comprising SEQ ID NO.: 1650 in alfalfa

[1338] A regenerating clone of alfalfa (Medicago sativa) is transformed using the method of McKersie et al., 1999 Plant Physiol 119: 839-847. Regeneration and transformation of alfalfa is genotype dependent and therefore a regenerating plant is required. Methods to obtain regenerating plants have been described. For example, these can be selected from the cultivar Rangelander (Agriculture Canada) or any other commercial alfalfa variety as described by Brown D C W and A Atanassov (1985. Plant Cell Tissue Organ Culture 4: 111-112). Alternatively, the RA3 variety (University of Wisconsin) has been selected for use in tissue culture (Walker et al., 1978 Am J Bot 65:654-659).

[1339] Petiole explants are cocultivated with an overnight culture of Agrobacterium tumefaciens C58C1 pMP90 (McKersie et al., 1999 Plant Physiol 119: 839-847) or LBA4404 containing a binary vector. Many different binary vector systems have been described for plant transformation (e.g. An, G. in Agrobacterium Protocols. Methods in Molecular Biology vol 44, pp 47-62, Gartland K M A and M R Davey eds. Humana Press, Totowa, N.J.). Many are based on the vector pBIN19 described by Bevan (Nucleic Acid Research. 1984. 12:8711-8721) that includes a plant gene expression cassette flanked by the left and right border sequences from the Ti plasmid of Agrobacterium tumefaciens. A plant gene expression cassette consists of at least two genes—a selection marker gene and a plant promoter regulating the transcription of the antisense, RNAi, snRNA, dsRNA, siRNA, miRNA, ta-siRNA, cosuppression construct, ribozyme molecule, or the viral nucleic acid molecule. Various selection marker genes can be used including the Arabidopsis gene encoding a mutated acetohydroxy acid synthase (AHAS) enzyme (U.S. Pat. Nos. 5,7673,666 and 6,225,105). Similarly, various promoters can be used to regulate the repression cassette that provides constitutive, developmental, tissue or environmental regulation of gene repression. In this example, the 34S promoter (GenBank Accession numbers M59930 and X16673) can be used to provide constitutive expression of the repression cassette.

[1340] The explants are cocultivated for 3 d in the dark on SH induction medium containing 288 mg/L Pro, 53 mg/L thioproline, 4.35 g/L K₂SO₄, and 100 μm acetosyringinone. The explants are washed in half-strength Murashige-Skoog medium (Murashige and Skoog, 1962) and plated on the same SH induction medium without acetosyringinone but with a suitable selection agent and suitable antibiotic to inhibit Agrobacterium growth. After several weeks, somatic embryos are transferred to BOi2Y development medium containing no growth regulators, no antibiotics, and 50 g/L sucrose. Somatic embryos are subsequently germinated on half-strength Murashige-Skoog medium. Rooted seedlings are transplanted into pots and grown in a greenhouse.

[1341] The T0 transgenic plants are propagated by node cuttings and rooted in Turface growth medium. The plants are defoliated and grown to a height of about 10 cm (approximately 2 weeks after defoliation). Furthermore the primary transgenic plants (T0) are analyzed for repressed expression of the gene to be repressed by standard methods such as Northern blots or quantitative RTPCR.

[1342] Tolerant plants according to [0412.1.1.1] (ryegrass plants), [0420.1.1.1] (soybean plants), [0425.1.1.1] (corn plants), [0429.1.1.1] (wheat plants), [0433.1.1.1] (Rapeseed/Canola) or [0438.1.1.1] (alfalfa plants) have higher survival rates and biomass production including seed yield, photosynthesis and dry matter production than susceptible plants.

[1343] Knock out of a gene by homologous recombination, e.g. of a gene comprising the sequence shown in SEQ ID NO.: 1025

[1344] Knock out of a gene by homologous recombination, e.g. of a gene comprising the sequence shown in SEQ ID NO.: 104

[1345] Knock out of a gene by homologous recombination, e.g. of a gene comprising the sequence shown in SEQ ID NO.: 190

[1346] Knock out of a gene by homologous recombination, e.g. of a gene comprising the sequence shown in SEQ ID NO.: 410

[1347] Knock out of a gene by homologous recombination, e.g. of a gene comprising the sequence shown in SEQ ID NO.: 512

[1348] Knock out of a gene by homologous recombination, e.g. of a gene comprising the sequence shown in SEQ ID NO.: 673

[1349] Knock out of a gene by homologous recombination, e.g. of a gene comprising the sequence shown in SEQ ID NO.: 729

[1350] Knock out of a gene by homologous recombination, e.g. of a gene comprising the sequence shown in SEQ ID NO.: 27

[1351] Knock out of a gene by homologous recombination, e.g. of a gene comprising the sequence shown in SEQ ID NO.: 923

[1352] Knock out of a gene by homologous recombination, e.g. of a gene comprising the sequence shown in SEQ ID NO.: 1083

[1353] Knock out of a gene by homologous recombination, e.g. of a gene comprising the sequence shown in SEQ ID NO.: 1385

[1354] Knock out of a gene by homologous recombination, e.g. of a gene comprising the sequence shown in SEQ ID NO.: 1418

[1355] Knock out of a gene by homologous recombination, e.g. of a gene comprising the sequence shown in SEQ ID NO.: 1464

[1356] Knock out of a gene by homologous recombination, e.g. of a gene comprising the sequence shown in SEQ ID NO.: 1551

[1357] Knock out of a gene by homologous recombination, e.g. of a gene comprising the sequence shown in SEQ ID NO.: 1593

[1358] Knock out of a gene by homologous recombination, e.g. of a gene comprising the sequence shown in SEQ ID NO.: 813

[1359] Knock out of a gene by homologous recombination, e.g. of a gene comprising the sequence shown in SEQ ID NO.: 1650

[1360] 1. Identifying Mutations in the Gene in Random Mutagenized Populations:

[1361] a) In Chemically or Radiation Mutated Population

[1362] Production of chemically or radiation mutated populations is a common technique and known to the skilled worker. Methods are described by Koorneef et al. 1982 and the citations therein and by Lightner and Caspar in “Methods in Molecular Biology” Vol 82. These techniques usually induce pointmutations that can be identified in any known gene using methods such as TILLING (Colbert et al. 2001).

[1363] b) In T-DNA or Transposon Mutated Lopulation by Reserve Genetics

[1364] Reverse genetic strategies to identify insertion mutants in genes of interest have been described for various cases eg. Krysan et al., 1999 (Plant Cell 1999, 11, 2283-2290); Sessions et al., 2002 (Plant Cell 2002, 14, 2985-2994); Young et al., 2001, (Plant Physiol. 2001, 125, 513-518); Koprek et al., 2000 (Plant J. 2000, 24, 253-263) ; Jeon et al., 2000 (Plant J. 2000, 22, 561-570) ; Tissier et al., 1999 (Plant Cell 1999, 11, 1841-1852); Speulmann et al., 1999 (Plant Cell 1999,11 , 1853-1866). Briefly material from all plants of a large T-DNA or transposon mutagenized plant population is harvested and genomic DNA prepared. Then the genomic DNA is pooled following specific architectures as described for example in Krysan et al., 1999 (Plant Cell 1999, 11, 2283-2290). Pools of genomics DNAs are then screened by specific multiplex PCR reactions detecting the combination of the insertional mutagen (eg T-DNA or Transposon) and the gene of interest. Therefore PCR reactions are run on the DNA pools with specific combinations of T-DNA or transposon border primers and gene specific primers. General rules for primer design can again be taken from Krysan et al., 1999 (Plant Cell 1999, 11, 2283-2290) Rescreening of lower levels DNA pools lead to the identifcation of individual plants in which the gene of interest is disrupted by the insertional mutagen.

[1365] Plant Screening for Growth Under Low Temperature Conditions

[1366] In a standard experiment soil was prepared as 3.5:1 (v/v) mixture of nutrient rich soil (GS90, Tantau, Wansdorf, Germany) and sand. Pots were filled with soil mixture and placed into trays. Water was added to the trays to let the soil mixture take up appropriate amount of water for the sowing procedure. The seeds for transgenic A. thaliana plants were sown in pots (6 cm diameter). Pots were collected until they filled a tray for the growth chamber. Then the filled tray was covered with a transparent lid and transferred into the shelf system of the precooled (4° C.-5° C.) growth chamber. Stratification was established for a period of 2-3 days in the dark at 4° C.-5° C. Germination of seeds and growth was initiated at a growth condition of 20° C., 60% relative humidity, 16 h photoperiod and illumination with fluorescent light at 200 μmol/m2s. Covers were removed 7 days after sowing. BASTA selection was done at day 9 after sowing by spraying pots with plantlets from the top. Therefore, a 0.07% (v/v) solution of BASTA concentrate (183 g/l glufosinate-ammonium) in tap water was sprayed. Transgenic events and wild-type control plants were distributed randomly over the chamber. The location of the trays inside the chambers was changed on working days from day 7 after sowing. Watering was carried out every two days after covers were removed from the trays. Plants were individualized 12-13 days after sowing by removing the surplus of seedlings leaving one seedling in a pot. Cold (chilling to 11° C.-12° C.) was applied 14 days after sowing until the end of the experiment. For measuring biomass performance, plant fresh weight was determined at harvest time (29-30 days after sowing) by cutting shoots and weighing them. Beside weighing, phenotypic information was added in case of plants that differ from the wild type control. Plants were in the stage prior to flowering and prior to growth of inflorescence when harvested. Significance values for the statistical significance of the biomass changes were calculated by applying the ‘student's’ t test (parameters: two-sided, unequal variance).

[1367] Three successive experiments were conducted. In the first experiment, one individual of each transformed line was tested.

[1368] In the second experiment, the event that had been determined as chilling tolerant or resistant in the first experiment, i.e. showed increased yield, in this case increased biomass production, in comparison to wild type, were put through a confirmation screen according to the same experimental procedures. In this experiment, max. 10 plants of each tolerant or resistant event were grown, treated and measured as before.

[1369] In the first two experiments, chilling tolerance or tolerance and biomass production was compared to wild type plants.

[1370] In the third experiment up to 20 replicates of each confirmed tolerant event, i.e. those that had been scored as tolerant or resistant in the second experiment, were grown, treated and scored as before. The results thereof are summarized in table VIII.

[1371] Table 3: Biomass production of transgenic A. thaliana after imposition of chilling stress.

[1372] Biomass production was measured by weighing plant rosettes. Biomass increase was calculated as ratio of average weight for trangenic plants compared to average weight of wild type control plants. The minimum and maximum biomass increase seen within the group of transgenic events is given for a locus with all events showing a significance value ≦0.1 and a biomass increase ≧1.1.

TABLE 3

| | | Biomass | Biomass |
|---|---|---|---|
| SeqID | Locus | Increase min | Increase max |
| 1385 | At5g40590 KO | 1.233 | 1.233 |

[1373] Equivalents

[1374] Those of ordinary skill in the art will recognize, or will be able to ascertain using no more than routine experimentation, many equivalents to the specific embodiments of the invention described herein. Such equivalents are intended to be encompassed by the following claims.

[1375] FIG. 1 T-DNA insertion vector pMTX1a300, SEQ ID NO.: 1 used used for insertional mutagenesis.

[1376] FIG. 2 Vector 1bxPcUbiColic, SEQ ID NO.: 2 used for construction of cosuppression constructs for repression of the activity or expression of a gene.

[1377] FIG. 3 Vector 10xPCUbiSpacer, SEQ ID NO.: 3 used for construction of RNAi constructs for repression of the activity or expression of a gene.

TABLE IA
Nucleic acid sequence ID numbers

| | | | | | 5. | | |
|---|---|---|---|---|---|---|---|
| | 1. | 2. | 3. | 4. | Lead | 6. | 7. |
| Application | Hit | Project | Locus | Organism | SEQ ID | Target | SEQ IDs of Nucleic Acid Homologs |
| 1 | 1 | LW1_KO_PCT | At5g50870 | A. th. | 1418 | — | 1420, 1422, 1424, 1426, 1428, 1430 |
| 1 | 2 | LW1_KO_PCT | At4g31120 | A. th. | 1025 | — | 1027, 1029, 1031, 1033, 1035, 1037, 1039, 1041, 1043 |
| 1 | 3 | LW1_KO_PCT | At3g14230 | A. th. | 729 | — | 731, 733, 735, 737, 739, 741, 743, 745, 747, 749, 751, 753, 755, |
| | | | | | | | 757, 759, 761, 763, 765, 767, 769, 771, 773 |
| 1 | 4 | LW1_KO_PCT | At1g12110 | A. th. | 27 | — | 29, 31, 33, 35, 37, 39, 41, 43, 45, 47, 49, 51, 53, 55, 57, 59, 61, |
| | | | | | | | 63, 65, 67, 69 |
| 1 | 5 | LW1_KO_PCT | At1g13270 | A. th. | 104 | — | 106, 108, 110, 112, 114, 116, 118, 120, 122, 124, 126, 128, 130, |
| | | | | | | | 132, 134, 136, 138, 140, 142, 144, 146, 148, 150, 152 |
| 1 | 6 | LW1_KO_PCT | At1g27080 | A. th. | 190 | — | 192, 194, 196, 198, 200, 202, 204, 206, 208, 210, 212, 214, 216, |
| | | | | | | | 218, 220, 222, 224, 226, 228, 230, 232, 234, 236, 238, 240, 242, |
| | | | | | | | 244, 246, 248, 250, 252, 254, 256, 258, 260, 262, 264, 266, 268, |
| | | | | | | | 270, 272, 274, 276, 278, 280, 282, 284, 286, 288, 290, 292, 294, |
| | | | | | | | 296, 298, 300, 302, 304, 306, 308, 310, 312, 314, 316, 318, 320, |
| | | | | | | | 322, 324, 326, 328, 330, 332, 334, 336, 338, 340, 342, 344, 346, |
| | | | | | | | 348, 350, 352, 354 |
| 1 | 7 | LW1_KO_PCT | At1g58360 | A. th. | 512 | — | 514, 516, 518, 520, 522, 524, 526, 528, 530, 532, 534, 536, 538, |
| | | | | | | | 540, 542, 544, 546, 548, 550, 552, 554, 556, 558, 560, 562, 564, |
| | | | | | | | 566, 568, 570, 572, 574, 576, 578, 580, 582, 584, 586, 588, 590, |
| | | | | | | | 592, 594, 596, 598, 600, 602, 604, 606, 608, 610, 612, 614, 616, |
| | | | | | | | 618, 620, 622, 624, 626, 628, 630, 632, 634, 636 |
| 1 | 8 | LW1_KO_PCT | At5g60780 | A. th. | 1464 | — | 1466, 1468, 1470, 1472, 1474, 1476, 1478, 1480, 1482, 1484, |
| | | | | | | | 1486, 1488, 1490, 1492, 1494, 1496, 1498, 1500, 1502, 1504, |
| | | | | | | | 1506, 1508, 1510, 1512, 1514, 1516, 1518, 1520, 1522, 1524 |
| 1 | 9 | LW1_KO_PCT | At3g54920 | A. th. | 813 | — | 815, 817, 819, 821, 823, 825, 827, 829, 831, 833, 835, 837, 839, |
| | | | | | | | 841, 843, 845, 847, 849, 851, 853, 855, 857, 859, 861, 863, 865, |
| | | | | | | | 867, 869, 871, 873, 875, 877, 879, 881, 883, 885, 887, 889, 891, |
| | | | | | | | 893, 895, 897, 899, 901, 903 |
| 1 | 10 | LW1_KO_PCT | At2g03670 | A. th. | 673 | — | 675, 677, 679, 681, 683, 685, 687, 689, 691, 693, 695, 697, 699, |
| | | | | | | | 701, 703, 705, 707, 709 |
| 1 | 11 | LW1_KO_PCT | At1g12110 | A. th. | 27 | — | 29, 31, 33, 35, 37, 39, 41, 43, 45, 47, 49, 51, 53, 55, 57, 59, 61, |
| | | | | | | | 63, 65, 67, 69 |
| 1 | 12 | LW1_KO_PCT | At1g58360 | A. th. | 512 | — | 514, 516, 518, 520, 522, 524, 526, 528, 530, 532, 534, 536, 538, |
| | | | | | | | 540, 542, 544, 546, 548, 550, 552, 554, 556, 558, 560, 562, 564, |
| | | | | | | | 566, 568, 570, 572, 574, 576, 578, 580, 582, 584, 586, 588, 590, |
| | | | | | | | 592, 594, 596, 598, 600, 602, 604, 606, 608, 610, 612, 614, 616, |
| | | | | | | | 618, 620, 622, 624, 626, 628, 630, 632, 634, 636 |
| 1 | 13 | LW1_KO_PCT | At5g40590 | A. th. | 1385 | — | 1387, 1389, 1391, 1393, 1395, 1397, 1399, 1401 |
| 1 | 14 | LW1_KO_PCT | At1g33760 | A. th. | 410 | — | 412, 414, 416, 418, 420, 422, 424, 426, 428, 430, 432, 434, 436, |
| | | | | | | | 438, 440, 442, 444, 446, 448, 450, 452, 454, 456, 458 |
| 1 | 15 | LW1_KO_PCT | At4g13430 | A. th. | 923 | — | 925, 927, 929, 931, 933, 935, 937, 939, 941, 943, 945, 947, 949, |
| | | | | | | | 951, 953, 955, 957, 959, 961, 963, 965, 967, 969, 971, 973, 975, |
| | | | | | | | 977, 979, 981, 983, 985, 987, 989, 991 |
| 1 | 16 | LW1_KO_PCT | At5g66160 | A. th. | 1593 | — | 1595, 1597, 1599, 1601, 1603, 1605, 1607, 1609, 1611, 1613, |
| | | | | | | | 1615, 1617, 1619, 1621, 1623, 1625, 1627, 1629, 1631, 1633 |
| 1 | 17 | LW1_KO_PCT | At3g55990 | A. th. | 1650 | — | 1652, 1654, 1656, 1658, 1660, 1662, 1664, 1666, 1668, 1670, |
| | | | | | | | 1672, 1674, 1676, 1678, 1680, 1682, 1684, 1686 |
| 1 | 18 | LW1_KO_PCT | At5g02330 | A. th. | 1083 | — | 1085, 1087, 1089, 1091, 1093, 1095, 1097, 1099, 1101, 1103, |
| | | | | | | | 1105, 1107, 1109, 1111, 1113, 1115, 1117, 1119, 1121, 1123, |
| | | | | | | | 1125, 1127, 1129, 1131, 1133, 1135, 1137, 1139, 1141, 1143, |
| | | | | | | | 1145, 1147, 1149, 1151, 1153, 1155, 1157, 1159, 1161, 1163, |
| | | | | | | | 1165, 1167, 1169, 1171, 1173, 1175, 1177, 1179, 1181, 1183, |
| | | | | | | | 1185, 1187, 1189, 1191, 1193, 1195, 1197, 1199, 1201, 1203, |
| | | | | | | | 1205, 1207, 1209, 1211, 1213, 1215, 1217, 1219, 1221, 1223, |
| | | | | | | | 1225, 1227, 1229, 1231, 1233, 1235, 1237, 1239, 1241, 1243, |
| | | | | | | | 1245, 1247, 1249, 1251, 1253, 1255, 1257, 1259, 1261, 1263, |
| | | | | | | | 1265, 1267, 1269, 1271, 1273, 1275, 1277, 1279, 1281, 1283, |
| | | | | | | | 1285, 1287, 1289, 1291, 1293, 1295, 1297, 1299, 1301, 1303, |
| | | | | | | | 1305, 1307, 1309, 1311, 1313, 1315, 1317, 1319, 1321, 1323, |
| | | | | | | | 1325, 1327, 1329, 1331, 1333, 1335, 1337, 1339, 1341, 1343, |
| | | | | | | | 1345, 1347, 1349, 1351, 1353, 1355, 1357, 1359, 1361, 1363, |
| | | | | | | | 1365, 1367, 1369, 1371 |
| 1 | 19 | LW1_KO_PCT | At5g64070 | A. th. | 1551 | — | 1553, 1555, 1557, 1559, 1561, 1563, 1565 |

TABLE IB
Nucleic acid sequence ID numbers

| | | | | | 5. | | |
|---|---|---|---|---|---|---|---|
| | 1. | 2. | 3. | 4. | Lead | 6. | 7. |
| Application | Hit | Project | Locus | Organism | SEQ ID | Target | SEQ IDs of Nucleic Acid Homologs |
| 1 | 1 | LW1_KO_PCT | At5g50870 | A. th. | 1418 | — | 1432, 1434, 1436, 1438, 1440, 1442, 1444, 1446, 1448, 1859, |
| | | | | | | | 1861, 1863, 1865, 1867, 1869, 1871, 1873, 1875, 1877, 1879, |
| | | | | | | | 1881, 1883, 1885, 1887, 1889, 1891, 1893, 1895, 1897 |
| 1 | 2 | LW1_KO_PCT | At4g31120 | A. th. | 1025 | — | 1045, 1047, 1049, 1051, 1053, 1055, 1057, 1059, 1849 |
| 1 | 3 | LW1_KO_PCT | At3g14230 | A. th. | 729 | — | 775, 777, 779, 781, 783, 785, 787, 789, 791, 793, 795, 797, |
| | | | | | | | 1799, 1801, 1803 |
| 1 | 4 | LW1_KO_PCT | At1g12110 | A. th. | 27 | — | 71, 73, 75, 77, 79, 81, 83, 1715, 1717, 1719, 1721, 1723, 1725, |
| | | | | | | | 1727 |
| 1 | 5 | LW1_KO_PCT | At1g13270 | A. th. | 104 | — | 154, 156, 158, 160, 162, 164, 166, 168, 170, 172, 174, 1731, |
| | | | | | | | 1733 |
| 1 | 6 | LW1_KO_PCT | At1g27080 | A. th. | 190 | — | 356, 358, 360, 362, 364, 366, 368, 370, 372, 374, 376, 378, 380, |
| | | | | | | | 382, 384, 386, 388, 390, 392, 394, 396, 1737, 1739, 1741, 1743, |
| | | | | | | | 1745, 1747, 1749, 1751, 1753, 1755, 1757, 1759, 1761 |
| 1 | 7 | LW1_KO_PCT | At1g58360 | A. th. | 512 | — | 638, 640, 642, 644, 646, 648, 650, 652, 1773, 1775, 1777, 1779, |
| | | | | | | | 1781, 1783, 1785, 1787, 1789 |
| 1 | 8 | LW1_KO_PCT | At5g60780 | A. th. | 1464 | — | 1526, 1528, 1530, 1532 |
| 1 | 9 | LW1_KO_PCT | At3g54920 | A. th. | 813 | — | 905, 1807, 1809, 1811, 1813, 1815, 1817, 1819, 1821, 1823, |
| | | | | | | | 1825, 1827, 1829, 1831 |
| 1 | 10 | LW1_KO_PCT | At2g03670 | A. th. | 673 | — | 711, 1793, 1795 |
| 1 | 11 | LW1_KO_PCT | At1g12110 | A. th. | 27 | — | 71, 73, 75, 77, 79, 81, 83, 1715, 1717, 1719, 1721, 1723, 1725, |
| | | | | | | | 1727 |
| 1 | 12 | LW1_KO_PCT | At1g58360 | A. th. | 512 | — | 638, 640, 642, 644, 646, 648, 650, 652, 1773, 1775, 1777, 1779, |
| | | | | | | | 1781, 1783, 1785, 1787, 1789 |
| 1 | 13 | LW1_KO_PCT | At5g40590 | A. th. | 1385 | — | 1853, 1855 |
| 1 | 14 | LW1_KO_PCT | At1g33760 | A. th. | 410 | — | 460, 462, 464, 466, 468, 470, 472, 474, 476, 478, 480, 482, 484, |
| | | | | | | | 486, 488, 490, 492, 494, 496, 498, 500, 1765, 1767, 1769 |
| 1 | 15 | LW1_KO_PCT | At4g13430 | A. th. | 923 | — | 993, 995, 997, 999, 1001, 1003, 1005, 1841, 1843, 1845 |
| 1 | 16 | LW1_KO_PCT | At5g66160 | A. th. | 1593 | — | 1635 |
| 1 | 17 | LW1_KO_PCT | At3g55990 | A. th. | 1650 | — | 1688, 1690, 1692, 1835, 1837 |
| 1 | 18 | LW1_KO_PCT | At5g02330 | A. th. | 1083 | — | — |
| 1 | 19 | LW1_KO_PCT | At5g64070 | A. th. | 1551 | — | 1567 |

TABLE IIA
Amino acid sequence ID numbers

| | | | | | 5. | | |
|---|---|---|---|---|---|---|---|
| | 1. | 2. | 3. | 4. | Lead | 6. | 7. |
| Application | Hit | Project | Locus | Organism | SEQ ID | Target | SEQ IDs of Polypeptide Homologs |
| 1 | 1 | LW1_KO_PCT | At5g50870 | A. th. | 1419 | — | 1421, 1423, 1425, 1427, 1429, 1431 |
| 1 | 2 | LW1_KO_PCT | At4g31120 | A. th. | 1026 | — | 1028, 1030, 1032, 1034, 1036, 1038, 1040, 1042, 1044 |
| 1 | 3 | LW1_KO_PCT | At3g14230 | A. th. | 730 | — | 732, 734, 736, 738, 740, 742, 744, 746, 748, 750, 752, 754, 756, |
| | | | | | | | 758, 760, 762, 764, 766, 768, 770, 772, 774 |
| 1 | 4 | LW1_KO_PCT | At1g12110 | A. th. | 28 | — | 30, 32, 34, 36, 38, 40, 42, 44, 46, 48, 50, 52, 54, 56, 58, 60, 62, |
| | | | | | | | 64, 66, 68, 70 |
| 1 | 5 | LW1_KO_PCT | At1g13270 | A. th. | 105 | — | 107, 109, 111, 113, 115, 117, 119, 121, 123, 125, 127, 129, 131, |
| | | | | | | | 133, 135, 137, 139, 141, 143, 145, 147, 149, 151, 153 |
| 1 | 6 | LW1_KO_PCT | At1g27080 | A. th. | 191 | — | 193, 195, 197, 199, 201, 203, 205, 207, 209, 211, 213, 215, 217, |
| | | | | | | | 219, 221, 223, 225, 227, 229, 231, 233, 235, 237, 239, 241, 243, |
| | | | | | | | 245, 247, 249, 251, 253, 255, 257, 259, 261, 263, 265, 267, 269, |
| | | | | | | | 271, 273, 275, 277, 279, 281, 283, 285, 287, 289, 291, 293, 295, |
| | | | | | | | 297, 299, 301, 303, 305, 307, 309, 311, 313, 315, 317, 319, 321, |
| | | | | | | | 323, 325, 327, 329, 331, 333, 335, 337, 339, 341, 343, 345, 347, |
| | | | | | | | 349, 351, 353, 355 |
| 1 | 7 | LW1_KO_PCT | At1g58360 | A. th. | 513 | — | 515, 517, 519, 521, 523, 525, 527, 529, 531, 533, 535, 537, 539, |
| | | | | | | | 541, 543, 545, 547, 549, 551, 553, 555, 557, 559, 561, 563, 565, |
| | | | | | | | 567, 569, 571, 573, 575, 577, 579, 581, 583, 585, 587, 589, 591, |
| | | | | | | | 593, 595, 597, 599, 601, 603, 605, 607, 609, 611, 613, 615, 617, |
| | | | | | | | 619, 621, 623, 625, 627, 629, 631, 633, 635, 637 |
| 1 | 8 | LW1_KO_PCT | At5g60780 | A. th. | 1465 | — | 1467, 1469, 1471, 1473, 1475, 1477, 1479, 1481, 1483, 1485, |
| | | | | | | | 1487, 1489, 1491, 1493, 1495, 1497, 1499, 1501, 1503, 1505, |
| | | | | | | | 1507, 1509, 1511, 1513, 1515, 1517, 1519, 1521, 1523, 1525 |
| 1 | 9 | LW1_KO_PCT | At3g54920 | A. th. | 814 | — | 816, 818, 820, 822, 824, 826, 828, 830, 832, 834, 836, 838, 840, |
| | | | | | | | 842, 844, 846, 848, 850, 852, 854, 856, 858, 860, 862, 864, 866, |
| | | | | | | | 868, 870, 872, 874, 876, 878, 880, 882, 884, 886, 888, 890, 892, |
| | | | | | | | 894, 896, 898, 900, 902, 904 |
| 1 | 10 | LW1_KO_PCT | At2g03670 | A. th. | 674 | — | 676, 678, 680, 682, 684, 686, 688, 690, 692, 694, 696, 698, 700, |
| | | | | | | | 702, 704, 706, 708, 710 |
| 1 | 11 | LW1_KO_PCT | At1g12110 | A. th. | 28 | — | 30, 32, 34, 36, 38, 40, 42, 44, 46, 48, 50, 52, 54, 56, 58, 60, 62, |
| | | | | | | | 64, 66, 68, 70 |
| 1 | 12 | LW1_KO_PCT | At1g58360 | A. th. | 513 | — | 515, 517, 519, 521, 523, 525, 527, 529, 531, 533, 535, 537, 539, |
| | | | | | | | 541, 543, 545, 547, 549, 551, 553, 555, 557, 559, 561, 563, 565, |
| | | | | | | | 567, 569, 571, 573, 575, 577, 579, 581, 583, 585, 587, 589, 591, |
| | | | | | | | 593, 595, 597, 599, 601, 603, 605, 607, 609, 611, 613, 615, 617, |
| | | | | | | | 619, 621, 623, 625, 627, 629, 631, 633, 635, 637 |
| 1 | 13 | LW1_KO_PCT | At5g40590 | A. th. | 1386 | — | 1388, 1390, 1392, 1394, 1396, 1398, 1400, 1402 |
| 1 | 14 | LW1_KO_PCT | At1g33760 | A. th. | 411 | — | 413, 415, 417, 419, 421, 423, 425, 427, 429, 431, 433, 435, 437, |
| | | | | | | | 439, 441, 443, 445, 447, 449, 451, 453, 455, 457, 459 |
| 1 | 15 | LW1_KO_PCT | At4g13430 | A. th. | 924 | — | 926, 928, 930, 932, 934, 936, 938, 940, 942, 944, 946, 948, 950, |
| | | | | | | | 952, 954, 956, 958, 960, 962, 964, 966, 968, 970, 972, 974, 976, |
| | | | | | | | 978, 980, 982, 984, 986, 988, 990, 992 |
| 1 | 16 | LW1_KO_PCT | At5g66160 | A. th. | 1594 | — | 1596, 1598, 1600, 1602, 1604, 1606, 1608, 1610, 1612, 1614, |
| | | | | | | | 1616, 1618, 1620, 1622, 1624, 1626, 1628, 1630, 1632, 1634 |
| 1 | 17 | LW1_KO_PCT | At3g55990 | A. th. | 1651 | — | 1653, 1655, 1657, 1659, 1661, 1663, 1665, 1667, 1669, 1671, |
| | | | | | | | 1673, 1675, 1677, 1679, 1681, 1683, 1685, 1687 |
| 1 | 18 | LW1_KO_PCT | At5g02330 | A. th. | 1084 | — | 1086, 1088, 1090, 1092, 1094, 1096, 1098, 1100, 1102, 1104, |
| | | | | | | | 1106, 1108, 1110, 1112, 1114, 1116, 1118, 1120, 1122, 1124, |
| | | | | | | | 1126, 1128, 1130, 1132, 1134, 1136, 1138, 1140, 1142, 1144, |
| | | | | | | | 1146, 1148, 1150, 1152, 1154, 1156, 1158, 1160, 1162, 1164, |
| | | | | | | | 1166, 1168, 1170, 1172, 1174, 1176, 1178, 1180, 1182, 1184, |
| | | | | | | | 1186, 1188, 1190, 1192, 1194, 1196, 1198, 1200, 1202, 1204, |
| | | | | | | | 1206, 1208, 1210, 1212, 1214, 1216, 1218, 1220, 1222, 1224, |
| | | | | | | | 1226, 1228, 1230, 1232, 1234, 1236, 1238, 1240, 1242, 1244, |
| | | | | | | | 1246, 1248, 1250, 1252, 1254, 1256, 1258, 1260, 1262, 1264, |
| | | | | | | | 1266, 1268, 1270, 1272, 1274, 1276, 1278, 1280, 1282, 1284, |
| | | | | | | | 1286, 1288, 1290, 1292, 1294, 1296, 1298, 1300, 1302, 1304, |
| | | | | | | | 1306, 1308, 1310, 1312, 1314, 1316, 1318, 1320, 1322, 1324, |
| | | | | | | | 1326, 1328, 1330, 1332, 1334, 1336, 1338, 1340, 1342, 1344, |
| | | | | | | | 1346, 1348, 1350, 1352, 1354, 1356, 1358, 1360, 1362, 1364, |
| | | | | | | | 1366, 1368, 1370, 1372 |
| 1 | 19 | LW1_KO_PCT | At5g64070 | A. th. | 1552 | — | 1554, 1556, 1558, 1560, 1562, 1564, 1566 |

TABLE IIB
Amino acid sequence ID numbers

| | | | | | 5. | | |
|---|---|---|---|---|---|---|---|
| | 1. | 2. | 3. | 4. | Lead | 6. | 7. |
| Application | Hit | Project | Locus | Organism | SEQ ID | Target | SEQ IDs of Polypeptide Homologs |
| 1 | 1 | LW1_KO_PCT | At5g50870 | A. th. | 1419 | — | 1433, 1435, 1437, 1439, 1441, 1443, 1445, 1447, 1449, 1860, |
| | | | | | | | 1862, 1864, 1866, 1868, 1870, 1872, 1874, 1876, 1878, 1880, |
| | | | | | | | 1882, 1884, 1886, 1888, 1890, 1892, 1894, 1896, 1898 |
| 1 | 2 | LW1_KO_PCT | At4g31120 | A. th. | 1026 | — | 1046, 1048, 1050, 1052, 1054, 1056, 1058, 1060, 1850 |
| 1 | 3 | LW1_KO_PCT | At3g14230 | A. th. | 730 | — | 776, 778, 780, 782, 784, 786, 788, 790, 792, 794, 796, 798, |
| | | | | | | | 1800, 1802, 1804 |
| 1 | 4 | LW1_KO_PCT | At1g12110 | A. th. | 28 | — | 72, 74, 76, 78, 80, 82, 84, 1716, 1718, 1720, 1722, 1724, 1726, |
| | | | | | | | 1728 |
| 1 | 5 | LW1_KO_PCT | At1g13270 | A. th. | 105 | — | 155, 157, 159, 161, 163, 165, 167, 169, 171, 173, 175, 1732, |
| | | | | | | | 1734 |
| 1 | 6 | LW1_KO_PCT | At1g27080 | A. th. | 191 | — | 357, 359, 361, 363, 365, 367, 369, 371, 373, 375, 377, 379, 381, |
| | | | | | | | 383, 385, 387, 389, 391, 393, 395, 397, 1738, 1740, 1742, 1744, |
| | | | | | | | 1746, 1748, 1750, 1752, 1754, 1756, 1758, 1760, 1762 |
| 1 | 7 | LW1_KO_PCT | At1g58360 | A. th. | 513 | — | 639, 641, 643, 645, 647, 649, 651, 653, 1774, 1776, 1778, 1780, |
| | | | | | | | 1782, 1784, 1786, 1788, 1790 |
| 1 | 8 | LW1_KO_PCT | At5g60780 | A. th. | 1465 | — | 1527, 1529, 1531, 1533 |
| 1 | 9 | LW1_KO_PCT | At3g54920 | A. th. | 814 | — | 906, 1808, 1810, 1812, 1814, 1816, 1818, 1820, 1822, 1824, |
| | | | | | | | 1826, 1828, 1830, 1832 |
| 1 | 10 | LW1_KO_PCT | At2g03670 | A. th. | 674 | — | 712, 1794, 1796 |
| 1 | 11 | LW1_KO_PCT | At1g12110 | A. th. | 28 | — | 72, 74, 76, 78, 80, 82, 84, 1716, 1718, 1720, 1722, 1724, 1726, |
| | | | | | | | 1728 |
| 1 | 12 | LW1_KO_PCT | At1g58360 | A. th. | 513 | — | 639, 641, 643, 645, 647, 649, 651, 653, 1774, 1776, 1778, 1780, |
| | | | | | | | 1782, 1784, 1786, 1788, 1790 |
| 1 | 13 | LW1_KO_PCT | At5g40590 | A. th. | 1386 | — | 1854, 1856 |
| 1 | 14 | LW1_KO_PCT | At1g33760 | A. th. | 411 | — | 461, 463, 465, 467, 469, 471, 473, 475, 477, 479, 481, 483, 485, |
| | | | | | | | 487, 489, 491, 493, 495, 497, 499, 501, 1766, 1768, 1770 |
| 1 | 15 | LW1_KO_PCT | At4g13430 | A. th. | 924 | — | 994, 996, 998, 1000, 1002, 1004, 1006, 1842, 1844, 1846 |
| 1 | 16 | LW1_KO_PCT | At5g66160 | A. th. | 1594 | — | 1636 |
| 1 | 17 | LW1_KO_PCT | At3g55990 | A. th. | 1651 | — | 1689, 1691, 1693, 1836, 1838 |
| 1 | 18 | LW1_KO_PCT | At5g02330 | A. th. | 1084 | — | — |
| 1 | 19 | LW1_KO_PCT | At5g64070 | A. th. | 1552 | — | 1568 |

TABLE III
Primer nucleic acid sequence ID numbers

| | | | | | 5. | | |
|---|---|---|---|---|---|---|---|
| | 1. | 2. | 3. | 4. | Lead | 6. | 7. |
| Application | Hit | Project | Locus | Organism | SEQ ID | Target | SEQ IDs of Primers |
| 1 | 1 | LW1_KO_PCT | At5g50870 | A. th. | 1418 | — | 1450, 1451, 1452, 1453, 1454, 1455, 1456, 1457 |
| 1 | 2 | LW1_KO_PCT | At4g31120 | A. th. | 1025 | — | 1061, 1062, 1063, 1064, 1065, 1066, 1067, 1068 |
| 1 | 3 | LW1_KO_PCT | At3g14230 | A. th. | 729 | — | 799, 800, 801, 802, 803, 804, 805, 806 |
| 1 | 4 | LW1_KO_PCT | At1g12110 | A. th. | 27 | — | 85, 86, 87, 88, 89, 90, 91, 92 |
| 1 | 5 | LW1_KO_PCT | At1g13270 | A. th. | 104 | — | 176, 177, 178, 179, 180, 181, 182, 183 |
| 1 | 6 | LW1_KO_PCT | At1g27080 | A. th. | 190 | — | 398, 399, 400, 401, 402, 403, 404, 405 |
| 1 | 7 | LW1_KO_PCT | At1g58360 | A. th. | 512 | — | 654, 655, 656, 657, 658, 659, 660, 661 |
| 1 | 8 | LW1_KO_PCT | At5g60780 | A. th. | 1464 | — | 1534, 1535, 1536, 1537, 1538, 1539, 1540, 1541 |
| 1 | 9 | LW1_KO_PCT | At3g54920 | A. th. | 813 | — | 907, 908, 909, 910, 911, 912, 913, 914 |
| 1 | 10 | LW1_KO_PCT | At2g03670 | A. th. | 673 | — | 713, 714, 715, 716, 717, 718, 719, 720 |
| 1 | 11 | LW1_KO_PCT | At1g12110 | A. th. | 27 | — | 85, 86, 87, 88, 89, 90, 91, 92 |
| 1 | 12 | LW1_KO_PCT | At1g58360 | A. th. | 512 | — | 654, 655, 656, 657, 658, 659, 660, 661 |
| 1 | 13 | LW1_KO_PCT | At5g40590 | A. th. | 1385 | — | 1403, 1404, 1405, 1406, 1407, 1408, 1409, 1410 |
| 1 | 14 | LW1_KO_PCT | At1g33760 | A. th. | 410 | — | 502, 503, 504, 505, 506, 507, 508, 509 |
| 1 | 15 | LW1_KO_PCT | At4g13430 | A. th. | 923 | — | 1007, 1008, 1009, 1010, 1011, 1012, 1013, 1014 |
| 1 | 16 | LW1_KO_PCT | At5g66160 | A. th. | 1593 | — | 1637, 1638, 1639, 1640, 1641, 1642, 1643, 1644 |
| 1 | 17 | LW1_KO_PCT | At3g55990 | A. th. | 1650 | — | 1694, 1695, 1696, 1697, 1698, 1699, 1700, 1701 |
| 1 | 18 | LW1_KO_PCT | At5g02330 | A. th. | 1083 | — | 1373, 1374, 1375, 1376, 1377, 1378, 1379, 1380 |
| 1 | 19 | LW1_KO_PCT | At5g64070 | A. th. | 1551 | — | 1569, 1570, 1571, 1572, 1573, 1574, 1575, 1576 |

TABLE IV
Consensus amino acid sequence ID numbers

| | | | | | 5. | | |
|---|---|---|---|---|---|---|---|
| | 1. | 2. | 3. | 4. | Lead SEQ | 6. | 7. |
| Application | Hit | Project | Locus | Organism | ID | Target | SEQ IDs of Consensus/Pattern Sequences |
| 1 | 1 | LW1_KO_PCT | At5g50870 | A. th. | 1419 | — | 1458, 1459, 1460, 1461, 1462, 1463 |
| 1 | 2 | LW1_KO_PCT | At4g31120 | A. th. | 1026 | — | 1069, 1070, 1071, 1072, 1073, 1074, 1075, 1076, 1077, 1078, |
| | | | | | | | 1079, 1080, 1081, 1082 |
| 1 | 3 | LW1_KO_PCT | At3g14230 | A. th. | 730 | — | 807, 808, 809, 810, 811, 812 |
| 1 | 4 | LW1_KO_PCT | At1g12110 | A. th. | 28 | — | 93, 94, 95, 96, 97, 98, 99, 100, 101, 102, 103 |
| 1 | 5 | LW1_KO_PCT | At1g13270 | A. th. | 105 | — | 184, 185, 186, 187, 188, 189 |
| 1 | 6 | LW1_KO_PCT | At1g27080 | A. th. | 191 | — | 406, 407, 408, 409 |
| 1 | 7 | LW1_KO_PCT | At1g58360 | A. th. | 513 | — | 662, 663, 664, 665, 666, 667, 668, 669, 670, 671, 672 |
| 1 | 8 | LW1_KO_PCT | At5g60780 | A. th. | 1465 | — | 1542, 1543, 1544, 1545, 1546, 1547, 1548, 1549, 1550 |
| 1 | 9 | LW1_KO_PCT | At3g54920 | A. th. | 814 | — | 915, 916, 917, 918, 919, 920, 921, 922 |
| 1 | 10 | LW1_KO_PCT | At2g03670 | A. th. | 674 | — | 721, 722, 723, 724, 725, 726, 727, 728 |
| 1 | 11 | LW1_KO_PCT | At1g12110 | A. th. | 28 | — | 93, 94, 95, 96, 97, 98, 99, 100, 101, 102, 103 |
| 1 | 12 | LW1_KO_PCT | At1g58360 | A. th. | 513 | — | 662, 663, 664, 665, 666, 667, 668, 669, 670, 671, 672 |
| 1 | 13 | LW1_KO_PCT | At5g40590 | A. th. | 1386 | — | 1411, 1412, 1413, 1414, 1415, 1416, 1417 |
| 1 | 14 | LW1_KO_PCT | At1g33760 | A. th. | 411 | — | 510, 511 |
| 1 | 15 | LW1_KO_PCT | At4g13430 | A. th. | 924 | — | 1015, 1016, 1017, 1018, 1019, 1020, 1021, 1022, 1023, 1024 |
| 1 | 16 | LW1_KO_PCT | At5g66160 | A. th. | 1594 | — | 1645, 1646, 1647, 1648, 1649 |
| 1 | 17 | LW1_KO_PCT | At3g55990 | A. th. | 1651 | — | 1702, 1703, 1704, 1705, 1706, 1707, 1708, 1709, 1710, 1711, |
| | | | | | | | 1712 |
| 1 | 18 | LW1_KO_PCT | At5g02330 | A. th. | 1084 | — | 1381, 1382, 1383, 1384 |
| 1 | 19 | LW1_KO_PCT | At5g64070 | A. th. | 1552 | — | 1577, 1578, 1579, 1580, 1581, 1582, 1583, 1584, 1585, 1586, |
| | | | | | | | 1587, 1588, 1589, 1590, 1591, 1592 |

1. A method for producing a transgenic plant with increased tolerance and/or resistance to environmental stress and increased biomass production as compared to a corresponding non-transformed wild type plant, which comprises:
a) reducing, repressing or deleting one or more activities selected from the group consisting of: 1-phosphatidylinositol 4-kinase, amino acid permease (AAP1), At3g55990-protein, At5g40590-protein, ATP-dependent peptidase/ATPase/nucleoside-triphosphatase/serine-type endopeptidase, DC1 domain-containing protein/protein-binding protein/zinc ion binding protein, DNA binding protein/transcription factor, hydro-lyase/aconitate hydratase, metalloexopeptidase (MAP1C), methyltransferase, nitrate transporter (ATNRT2.3), nitrate/chlorate transporter (NRT1.1), pectate lyase protein/powdery mildew susceptibility protein (PMR6), peptidase/ubiquitin-protein ligase/zinc ion binding protein (JR700), proton-dependent oligopeptide transport protein, transcription factor, and ubiquitin conjugating enzyme/ubiquitin-like activating enzyme, in a plant cell, a plant or a part thereof, and
b) generating a transformed plant with increased tolerance and/or resistance to environmental stress and increased biomass production as compared to a corresponding non-transformed wild type plant and growing under conditions which permit the development of the plant.

2. A method for producing a transgenic plant with increased tolerance and/or resistance to environmental stress and increased biomass production as compared to a corresponding non-transformed wild type plant, which comprises:
a) reducing, repressing, or deleting the activity of
(i) a polypeptide comprising a polypeptide, a consensus sequence or at least one polypeptide motif as depicted in column 5 or 7 of Table II or of Table IV, respectively; or
(ii) an expression product of a nucleic acid molecule comprising a polynucleotide as depicted in column 5 or 7 of Table I,
(iii) or a functional equivalent of (i) or (ii);
in a plant cell, a plant or a part thereof, and
b) generating a transformed plant with increased tolerance and/or resistance to environmental stress and increased biomass production as compared to a corresponding non-transformed wild type plant and growing under conditions which permit the development of the plant.

3. The method of claim 2, comprising reducing, decreasing or deleting the expression or activity of at least one nucleic acid molecule having or encoding the activity of at least one nucleic acid molecule represented by the nucleic acid molecule as depicted in column 5 of Table I, and comprising a nucleic acid molecule which is selected from the group consisting of:
a) a nucleic acid molecule encoding the polypeptide shown in column 5 or 7 of Table II;
b) a nucleic acid molecule shown in column 5 or 7 of Table I;
c) a nucleic acid molecule, which, as a result of the degeneracy of the genetic code, can be derived from a polypeptide sequence depicted in column 5 or 7 of Table II;
d) a nucleic acid molecule having at least 30% identity with the nucleic acid molecule sequence of a polynucleotide comprising the nucleic acid molecule shown in column 5 or 7 of Table I;
e) a nucleic acid molecule encoding a polypeptide having at least 30% identity with the amino acid sequence of the polypeptide encoded by the nucleic acid molecule of (a) to (c) and having the activity represented by a nucleic acid molecule comprising a polynucleotide as depicted in column 5 of Table I;
f) a nucleic acid molecule encoding a polypeptide which can be isolated with the aid of monoclonal or polyclonal antibodies made against a polypeptide encoded by one of the nucleic acid molecules of (a) to (e) and having the activity represented by the nucleic acid molecule comprising a polynucleotide as depicted in column 5 of Table I;
g) a nucleic acid molecule encoding a polypeptide comprising the consensus sequence or one or more polypeptide motifs as shown in column 7 of Table IV and having the activity represented by a nucleic acid molecule comprising a polynucleotide as depicted in column 5 of Table II or IV;
h) a nucleic acid molecule encoding a polypeptide having the activity represented by a protein as depicted in column 5 of Table II;
i) a nucleic acid molecule which comprises a polynucleotide, which is obtained by amplifying a cDNA library or a genomic library using the primers in column 7 of Table III which do not start at their 5′-end with the nucleotides ATA and having the activity represented by a nucleic acid molecule comprising a polynucleotide as depicted in column 5 of Table II or IV;
j) a nucleic acid molecule encoding a polypeptide, the polypeptide being derived by substituting, deleting and/or adding one or more amino acids of the amino acid sequence of the polypeptide encoded by the nucleic acid molecules (a) to (d); and
k) a nucleic acid molecule which is obtainable by screening a suitable nucleic acid library under stringent hybridization conditions with a probe comprising a complementary sequence of a nucleic acid molecule of (a) or (b) or with a fragment thereof, having at least 15 nt of a nucleic acid molecule complementary to a nucleic acid molecule sequence characterized in (a) to (d) and encoding a polypeptide having the activity represented by a protein comprising a polypeptide as depicted in column 5 of Table II;
or which comprises a sequence which is complementary thereto;
or reducing, repressing, decreasing or deleting an expression product of a nucleic acid molecule comprising a nucleic acid molecule as depicted in (a) to (k) or a protein encoded by said nucleic acid molecule.

4. The method of claim 3, wherein the activity or expression of a polypeptide comprising a polypeptide encoded by the nucleic acid molecule characterized in claim 3 is reduced in a plant cell, a plant or a part thereof.

5. The method of claim 3, whereby the process comprises at least one step selected from the group consisting of:
(a) introducing of a nucleic acid molecule encoding a ribonucleic acid sequence, which is able to form a double-stranded ribonucleic acid molecule, whereby a fragment of at least 17 nt of said double-stranded ribonucleic acid molecule has a homology of at least 50% to a nucleic acid molecule selected from the group of
(aa) a nucleic acid molecule as characterized in claim 3;
(ab) a nucleic acid molecule as depicted in column 5 or 7 of Table I or encoding a polypeptide as depicted in column 5 or 7 of Table II, and
(ac) a nucleic acid molecule encoding a polypeptide having the activity of polypeptide depicted in column 5 of Table II or encoding the expression product of a polynucleotide comprising a nucleic acid molecule as depicted in column 5 or 7 of Table I;
(b) introducing an RNAi, snRNA, dsRNA, siRNA, miRNA, ta-siRNA, cosuppression molecule, ribozyme, or antisense nucleic acid molecule, whereby the RNAi, snRNA, dsRNA, siRNA, miRNA, ta-siRNA, cosuppression molecule, ribozyme, or antisense nucleic acid molecule comprises a fragment of at least 17 nt with a a homology of at least 50% to a nucleic acid molecule selected from a group defined in section (a) of this claim.
(c) introducing of a ribozyme which specifically cleaves a nucleic acid molecule selected from the group defined in section (a) of this claim;
(d) introducing of the RNAi, snRNA, dsRNA, siRNA, miRNA, ta-siRNA, cosuppression molecule, ribozyme, or antisense nucleic acid molecule characterized in (b) and the ribozyme characterized in (c);
(e) introducing of a sense nucleic acid molecule conferring the expression of a nucleic acid molecule comprising a nucleic acid molecule selected from the group defined in claim 3 or defined in section (ab) or (ac) of this claim or a nucleic acid molecule encoding a polypeptide having at least 50% identity with the amino acid sequence of the polypeptide encoded by the nucleic acid molecule of claim 3 (a) to (c) and having the activity represented by a protein comprising a polypeptide depicted in column 5 of Table II for inducing a co-suppression of the endogenous expression product;
(f) introducing a nucleic acid molecule conferring the expression of a dominant-negative mutant of a protein having the activity of a protein as depicted in column 5 or 7 of Table II or comprising a polypeptide being encoded by a nucleic acid molecule of claim 3;
(g) introducing a nucleic acid molecule encoding a factor, which binds to a nucleic acid molecule comprising a nucleic acid molecule selected from the group defined in claim 3 or defined in section (ab) or (ac) of this claim conferring the expression of a protein having the activity of a protein encoded by a nucleic acid molecule as characterized in claim 3;
(h) introducing a viral nucleic acid molecule conferring the decline of a RNA molecule comprising a nucleic acid molecule selected from the group defined in claim 3 or defined in section (ab) or (ac) of this claim conferring the expression of a protein encoded by a nucleic acid molecule as characterized in claim 3;
(i) introducing a nucleic acid construct capable to recombine with and silence, inactivate, repress or reduces the activity of an endogenous gene comprising a nucleic acid molecule selected from the group defined in claim 3 or defined in section (ab) or (ac) of this claim conferring the expression of a protein encoded by a nucleic acid molecule as characterized in claim 3;
(j) introducing a non-silent mutation in a endogenous gene comprising a nucleic acid molecule selected from the group defined in claim 3 or defined in section (ab) or (ac) of this claim; and
(k) introducing an expression construct conferring the expression of nucleic acid molecule characterized in any one of (a) to (i).

6. The method of claim 3, wherein a fragment of at least 17 by of a 3′- or 5′-nucleic acid sequence of a sequence comprising a nucleic acid molecule selected from the group defined in claim 3; or a nucleic acid with an identity of at least 50% comprising a nucleic acid molecule as depicted in column 5 or 7 of Table I or encoding a polypeptide as depicted in column 5 or 7 of Table II, or a nucleic acid molecule encoding a polypeptide having the activity of polypeptide depicted in column 5 of Table II or encoding the expression product of a polynucleotide comprising a nucleic acid molecule as depicted in column 5 or 7 of Table I, is used for the reduction of the nucleic acid molecule of claim 3 or the polypeptide encoded by said nucleic acid molecule.

7. The method of claim 1, wherein the reduction or deletion is caused by applying a chemical compound to the plant cell, the plant or a part thereof.

8. The method of claim 1, wherein the plant is selected from the group consisting of Anacardiaceae, Asteraceae, Apiaceae, Betulaceae, Boraginaceae, Brassicaceae, Bromeliaceae, Caricaceae, Cannabaceae, Convolvulaceae, Chenopodiaceae, Cucurbitaceae, Elaeagnaceae, Ericaceae, Euphorbiaceae, Fabaceae, Geraniaceae, Gramineae, Juglandaceae, Lauraceae, Leguminosae, Linaceae, perennial grass, fodder crops, vegetables and ornamentals.

9. The method of claim 3 comprising a RNAi, snRNA, dsRNA, siRNA, miRNA, ta-siRNA, cosuppression molecule, ribozyme, antibody and/or antisense nucleic that has been designed to target the expression product of a gene comprising the nucleic acid molecule as characterized in claim 3 to induce a breakdown of the mRNA of the said gene of interest and thereby silence the gene expression, or of an expression cassette ensuring the expression of the former.

10. An isolated nucleic acid molecule which comprises a nucleic acid molecule selected from the group consisting of:
a) a nucleic acid molecule which encodes a polypeptide comprising the polypeptide shown in column 5 or 7 of Table IIB;
b) a nucleic acid molecule which comprising a polynucleotide shown in column 5 or 7 of Table IB;
c) a nucleic acid molecule comprising a nucleic acid sequence, which, as a result of the degeneracy of the genetic code, can be derived from a polypeptide sequence depicted in column 5 or 7 of Table IIB and having the activity represented by the protein depicted in column 5 of Table II;
d) a nucleic acid molecule encoding a polypeptide having at least 50% identity with the amino acid sequence of a polypeptide encoded by the nucleic acid molecule of (a) or (c) and having the activity represented by the protein depicted in column 5 of Table II;
e) a nucleic acid molecule encoding a polypeptide, which is isolated with the aid of monoclonal antibodies against a polypeptide encoded by one of the nucleic acid molecules of (a) to (c) and having the activity represented by the protein depicted in column 5 of Table II;
f) a nucleic acid molecule encoding a polypeptide comprising the consensus sequence or a polypeptide motif shown in column 7 of Table IV and having the biological activity represented by the protein depicted in column 5 of Table II;
g) a nucleic acid molecule encoding a polypeptide having the activity represented by a protein as depicted in column 5 of Table II;
h) a nucleic acid molecule which comprises a polynucleotide, which is obtained by amplifying a cDNA library or a genomic library using the primers in column 7 of Table III which do not start at their 5′-end with the nucleotides ATA; and
i) a nucleic acid molecule which is obtainable by screening a suitable library under stringent hybridization conditions with a probe comprising one of the sequences of the nucleic acid molecule of (a) to (c) or with a fragment of at least 17 nt of the nucleic acid molecule characterized in any one of (a) to (h) and encoding a polypeptide having the activity represented by the protein depicted in column 5 of Table II;
or which comprises a sequence which is complementary thereto;
whereby the nucleic acid molecule according to (a) to (i) is at least in one or more nucleotides different from the sequence depicted in column 5 or 7 of Table IA and which encodes a protein which differs at least in one or more amino acids from the protein sequences depicted in column 5 or 7 of Table IIA.

11. A RNAi, snRNA, dsRNA, siRNA, miRNA, ta-siRNA, cosuppression molecule, ribozyme, antibody or antisense nucleic acid molecule for the reduction of the activity or expression of the nucleic acid molecule of claim 10 or a polypeptide encoded by said nucleic acid molecule.

12. A RNAi, snRNA, dsRNA, siRNA, miRNA, ta-siRNA, cosuppression molecule, ribozyme, or antisense nucleic acid molecule comprising a fragment of at least 17 nt of the nucleic acid molecule of claim 10.

13. A double-stranded RNA (dsRNA), RNAi, snRNA, siRNA, miRNA, antisense or to-siRNA molecule or ribozyme, which is able to form a double-stranded ribonucleic acid molecule, whereby a fragment of at least 17 at of said double-stranded ribonucleic acid molecule has a homology of at least 50% to a nucleic acid molecule selected from the group of
(aa) the nucleic acid molecule of claim 10;
(ab) a nucleic acid molecule as depicted in column 5 or 7 of Table I or encoding a polypeptide as depicted in column 5 or 7 of Table II, and
(ac) a nucleic acid molecule encoding a polypeptide having the activity of polypeptide depicted in column 5 or 7 of Table II or encoding the expression product of a polynucleotide comprising a nucleic acid molecule as depicted in column 5 or 7 of Table I.

14. The dsRNA molecule of claim 11, whereby the sense strand and the antisense strand are covalently bound to each other and the antisense strand is essentially the complement of the “sense”-RNA strand.

15. A viral nucleic acid molecule conferring the decline of the activity or expression of a nucleic acid molecule as characterized in claim 10 or a polypeptide encoded by said nucleic acid molecule.

16. A TILLING primer for the identification of a knock out of a gene comprising a nucleic acid sequence of a nucleic acid molecule as depicted in any one column 5 or 7 of Table I.

17. A dominant-negative mutant of a polypeptide comprising a polypeptide as shown in column 5 or 7 of Table II.

18. A nucleic acid molecule encoding the dominant negative mutant of claim 17.

19. The TILLING primer of claim 16 comprising a fragment of a nucleic acid sequence as depicted in column 5 or 7 of Table I or complementary fragment thereof.

20. A nucleic acid construct conferring the expression of the nucleic acid molecule of claim 10, of a RNAi, snRNA, dsRNA, siRNA, miRNA, ta-siRNA, cosuppression molecule, ribozyme, antibody or antisense nucleic acid molecule for the reduction of the activity or expression of the nucleic acid molecule or a polypeptide encoded by said nucleic acid molecule, of as viral nucleic acid molecule conferring the decline of the activity or expression of the nucleic acid molecule or a polypeptide encoded by said nucleic acid molecule.

21. A nucleic acid construct comprising the isolated nucleic acid molecule as claimed in claim 10 or a RNAi, snRNA, dsRNA, siRNA, miRNA, ta-siRNA, cosuppression molecule, ribozyme, or antisense nucleic acid molecule for the reduction of the activity or expression of the nucleic acid molecule or a polypeptide encoded by said nucleic acid molecule, or a viral nucleic acid molecule conferring the decline of the activity or expression of the nucleic acid molecule or a polypeptide encoded by said nucleic acid molecule, wherein the nucleic acid molecule is functionally linked to one or more regulatory signals.

22. A vector comprising the nucleic acid molecule claimed in claim 10 or a RNAi, snRNA, dsRNA, siRNA, miRNA, ta-siRNA, cosuppression molecule, ribozyme, or antisense nucleic acid molecule for the reduction of the activity or expression of the nucleic acid molecule or a polypeptide encoded by said nucleic acid molecule, or a viral nucleic acid molecule conferring the decline of the activity or expression of the nucleic acid molecule or a polypeptide encoded by said nucleic acid molecule, or a nucleic acid construct comprising the nucleic acid molecule or the RNAi, snRNA, dsRNA, siRNA, miRNA, ta-siRNA, cosuppression molecule, ribozyme, or antisense nucleic acid molecule.

23. The vector as claimed in claim 22, wherein nucleic acid molecule is in operable linkage with regulatory sequences for the expression in a plant cell, a plant or a part thereof.

24. A transgenic plant cell, plant or a part thereof which has been transformed stably or transiently with the nucleic acid molecule as claimed in claim 10; or with a nucleic acid construct comprising the nucleic acid molecule or a RNAi, snRNA, dsRNA, siRNA, miRNA, ta-siRNA, cosuppression molecule, ribozyme, or antisense nucleic acid molecule for the reduction of the activity or expression of the nucleic acid molecule or a polypeptide encoded by said nucleic acid molecule or a viral nucleic acid molecule conferring the decline of the activity or expression of the nucleic acid molecule or a polypeptide encoded by said nucleic acid molecule; or with a vector comprising the nucleic acid molecule or the nucleic acid construct.

25. A transgenic plant cell, plant or a part thereof wherein the activity of a protein comprising a polypeptide, a consensus sequence or a polypeptide motif as depicted in column 5 or 7 of Table II or IV or a nucleic acid molecule comprising a nucleic acid molecule as depicted in column 5 or 7 of Table I is reduced.

26. The transgenic plant cell, a plant or a part thereof of claim 24 derived from a monocotyledonous plant.

27. The transgenic plant cell, a plant or a part thereof of claim 24 derived from a dicotyledonous plant.

28. The transgenic plant cell, a plant or a part thereof of claim 24 wherein the plant is selected from the group consisting of maize (corn), wheat, rye, oat, triticale, rice, barley, soy, peanut, cotton, oil seed rape, including canola and winter oil seed rape, manihot, pepper, sunflower, flax, borage, safflower, linseed, primrose, rapeseed, turnip rape, tagetes, solanaceous plants, potato, tobacco, eggplant, tomato, Vicia species, pea, alfalfa, coffee, cacao, tea, Salix species, oil palm, coconut, perennial grass, forage crops and Arabidopsis thaliana.

29. The transgenic plant cell, a plant or a part thereof of claim 24, derived from a gymnosperm plant.

30. An isolated polypeptide encoded by the nucleic acid molecule as claimed in claim 10 or comprising the polypeptide as depicted in column 7 of Table IIB.

31. An antibody, which specifically binds to the polypeptide as claimed in claim 30.

32. A plant tissue, plant, harvested plant material or propagation material of a plant comprising the plant cell as claimed in claim 24.

33. A process for producing a polypeptide encoded by the nucleic acid sequence as claimed in claim 10, comprising expressing the polypeptide in a host cell comprising the nucleic acid sequence.

34. The transgenic plant cell, a plant or a part thereof of claims 24, wherein the transgenic plant cell, plant, or part thereof has increased tolerance and/or resistance to environmental stress and increased biomass production as compared to a corresponding non-transformed wild type plant cell, plant, or part thereof, wherein the environmental stress is selected from the group comprised of salinity, drought, temperature, metal, chemical, pathogenic and oxidative stresses, or combinations thereof.

35. The transgenic plant cell, a plant or a part thereof of claim 34, wherein the environmental stress is drought and/or desiccation.

36. A transgenic plant cell, a plant or a part thereof of claim 24 that has
i) an increased biomass production under conditions where water would be limiting for growth for a non-transformed wild type plant cell, a plant or part thereof
ii) an increased biomass production under conditions of drought and/or desiccation where said conditions would be limiting for growth for a non-transformed wild type plant cell, a plant or part thereof and/or
iii) an increased biomass production under conditions of low humidity where said conditions would be limiting for growth for a non-transformed wild type plant cell, a plant or part thereof.

37. A method for screening for an antagonists of the activity being represented by the polypeptide encoded by the nucleic acid molecule characterized in claim 2:
i) contacting an organism, its cells, tissues or parts, which express the polypeptide with a chemical compound or a sample comprising a plurality of chemical compounds under conditions which permit the reduction or deletion of the expression of the nucleic acid molecule encoding the activity represented by the protein or which permit the reduction or deletion of the activity of the protein;
ii) assaying the level of the activity of the protein or the polypeptide expression level in the plant, its cells, tissues or parts thereof; and
iii) identifying an antagonist by comparing the measured level of the activity of the protein or the polypeptide expression level with a standard level of the activity of the protein or the polypeptide expression level measured in the absence of said chemical compound or a sample comprising said plurality of chemical compounds, whereby an decreased level in comparison to the standard indicates that the chemical compound or the sample comprising said plurality of chemical compounds is an antagonist.

38. A process for the identification of a compound conferring increased tolerance and/or resistance to environmental stress and increased biomass production as compared to a corresponding non-transformed wild type plant in a plant; comprising the steps:
i) culturing or maintaining a plant or a part thereof expressing the polypeptide encoded by the nucleic acid molecule characterized in claim 2 or a polynucleotide encoding said polypeptide and a readout system capable of interacting with the polypeptide under suitable conditions which permit the interaction of the polypeptide with this readout system in the presence of a chemical compound or a sample comprising a plurality of chemical compounds and capable of providing a detectable signal in response to the binding of a chemical compound to said polypeptide under conditions which permit the depression of said readout system and of said polypeptide; and
ii) identifying if the chemical compound is an effective antagonist by detecting the presence or absence or decrease or increase of a signal produced by said readout system.

39. A composition comprising the nucleic acid molecule of claim 10; a protein encoded by the nucleic acid molecule; a nucleic acid construct comprising the nucleic acid molecule or a RNAi, snRNA, dsRNA, siRNA, miRNA, ta-siRNA, cosuppression molecule, ribozyme, or antisense nucleic acid molecule for the reduction of the activity or expression of the nucleic acid molecule or a polypeptide encoded by said nucleic acid molecule or a viral nucleic acid molecule conferring the decline of the activity or expression of the nucleic acid molecule or a polypeptide encoded by said nucleic acid molecule; a vector comprising the nucleic acid molecule or the nucleic acid construct; a plant comprising the nucleic acid molecule; or a RNAi, snRNA, dsRNA, siRNA, miRNA, ta-siRNA, cosuppression molecule, ribozyme, or antisense nucleic acid molecule for the reduction of the activity or expression of the nucleic acid molecule or a polypeptide encoded by said nucleic acid molecule; and optionally a agricultural acceptable carrier.

40. A food or feed composition comprising the nucleic acid molecule of claim 10; a protein encoded by the nucleic acid molecule; a nucleic acid construct comprising the nucleic acid molecule or a RNAi, snRNA, dsRNA, siRNA, miRNA, ta-siRNA, cosuppression molecule, ribozyme, or antisense nucleic acid molecule for the reduction of the activity or expression of the nucleic acid molecule or a polypeptide encoded by said nucleic acid molecule or a viral nucleic acid molecule conferring the decline of the activity or expression of the nucleic acid molecule or a polypeptide encoded by said nucleic acid molecule; a vector comprising the nucleic acid molecule or the nucleic acid construct; a RNAi, snRNA, dsRNA, siRNA, miRNA, ta-siRNA, cosuppression molecule, ribozyme, or antisense nucleic acid molecule for the reduction of the activity or expression of the nucleic acid molecule or a polypeptide encoded by said nucleic acid molecule; a plant, plant tissue, harvested plant material or propagation material of said plant comprising the nucleic acid molecule.

41. (canceled)

The application's sequence listing, which the Patent Office published only in electronic form, follows.

SEQUENCE LISTING (1898 sequences)

SEQ ID NO: 1 - DNA, 8045 bp, Artificial Sequence
  T-DNA insertion vector used to create knock-out plant lines
  misc_feature (945)..(1945): pVS1 sta
  rep_origin (2538)..(3538): pVS1
  misc_feature (3948)..(4208): pBR322 bom
  rep_origin (4348)..(4628): pBR322
  misc_feature (4922)..(5713): Kanamycin resistance
  misc_feature (6138)..(6163): T-DNA left border
  promoter (6241)..(6718): mas 2'1' promoter
  primer_bind (6507)..(6525): mas271_f
  misc_feature (6722)..(7288): bar
  primer_bind (7280)..(7304): M1300_7329
  polyA_signal (7292)..(7503): OCS poly(A)
  primer_bind (7923)..(7944): Right border rev primer
  misc_feature (7924)..(7949): T-DNA right border
actttgatccaacccctccgctgctatagtgcagtcggcttctgacgttcagtgcagccgtcttctgaaaacgacatgtcgcacaagtcctaagttacgcgacaggctgccgccctgcccttttcctggcgttttcttgtcgcgtgttttagtcgcataaagtagaatacttgcgactagaaccggagacattacgccatgaacaagagcgccgccgctggcctgctgggctatgcccgcgtcagcaccgacgaccaggacttgaccaaccaacgggccgaactgcacgcggccggctgcaccaagctgttttccgagaagatcaccggcaccaggcgcgaccgcccggagctggccaggatgcttgaccacctacgccctggcgacgttgtgacagtgaccaggctagaccgcctggcccgcagcacccgcgacctactggacattgccgagcgcatccaggaggccggcgcgggcctgcgtagcctggcagagccgtgggccgacaccaccacgccggccggccgcatggtgttgaccgtgttcgccggcattgccgagttcgagcgttccctaatcatcgaccgcacccggagcgggcgcgaggccgccaaggcccgaggcgtgaagtttggcccccgccctaccctcaccccggcacagatcgcgcacgcccgcgagctgatcgaccaggaaggccgcaccgtgaaagaggcggctgcactgcttggcgtgcatcgctcgaccctgtaccgcgcacttgagcgcagcgaggaagtgacgcccaccgaggccaggcggcgcggtgccttccgtgaggacgcattgaccgaggccgacgccctggcggccgccgagaatgaacgccaagaggaacaagcatgaaaccgcaccaggacggccaggacgaaccgtttttcattaccgaagagatcgaggcggagatgatcgcggccgggtacgtgttcgagccgcccgcgcacgtctcaaccgtgcggctgcatgaaatcctggccggtttgtctgatgccaagctggcggcctggccggccagcttggccgctgaagaaaccgagcgccgccgtctaaaaaggtgatgtgtatttgagtaaaacagcttgcgtcatgcggtcgctgcgtatatgatgcgatgagtaaataaacaaatacgcaaggggaacgcatgaaggttatcgctgtacttaaccagaaaggcgggtcaggcaagacgaccatcgcaacccatctagcccgcgccctgcaactcgccggggccgatgttctgttagtcgattccgatccccagggcagtgcccgcgattgggcggccgtgcgggaagatcaaccgctaaccgttgtcggcatcgaccgcccgacgattgaccgcgacgtgaaggccatcggccggcgcgacttcgtagtgatcgacggagcgccccaggcggcggacttggctgtgtccgcgatcaaggcagccgacttcgtgctgattccggtgcagccaagcccttacgacatatgggccaccgccgacctggtggagctggttaagcagcgcattgaggtcacggatggaaggctacaagcggcctttgtcgtgtcgcgggcgatcaaaggcacgcgcatcggcggtgaggttgccgaggcgctggccgggtacgagctgcccattcttgagtcccgtatcacgcagcgcgtgagctacccaggcactgccgccgccggcacaaccgttcttgaatcagaacccgagggcgacgctgcccgcgaggtccaggcgctggccgctgaaattaaatcaaaactcatttgagttaatgaggtaaagagaaaatgagcaaaagcacaaacacgctaagtgccggccgtccgagcgcacgcagcagcaaggctgcaacgttggccagcctggcagacacgccagccatgaagcgggtcaactttcagttgccggcggaggatcacaccaagctgaagatgtacgcggtacgccaaggcaagaccattaccgagctgctatctgaatacatcgcgcagctaccagagtaaatgagcaaatgaataaatgagtagatgaattttagcggctaaaggaggcggcatggaaaatcaagaacaaccaggcaccgacgccgtggaatgccccatgtgtggaggaacgggcggttggccaggcgtaagcggctgggttgtctgccggccctgcaatggcactggaacccccaagcccgaggaatcggcgtgacggtcgcaaaccatccggcccggtacaaatcggcgcggcgctgggtgatgacctggtggagaagttgaaggccgcgcaggccgcccagcggcaacgcatcgaggcagaagcacgccccggtgaatcgtggcaagcggccgctgatcgaatccgcaaagaatcccggcaaccgccggcagccggtgcgccgtcgattaggaagccgcccaagggcgacgagcaaccagattttttcgttccgatgctctatgacgtgggcacccgcgatagtcgcagcatcatggacgtggccgttttccgtctgtcgaagcgtgaccgacgagctggcgaggtgatccgctacgagcttccagacgggcacgtagaggtttccgcagggccggccggcatggccagtgtgtgggattacgacctggtactgatggcggtttcccatctaaccgaatccatgaaccgataccgggaagggaagggagacaagcccggccgcgtgttccgtccacacgttgcggacgtactcaagttctgccggcgagccgatggcggaaagcagaaagacgacctggtagaaacctgcattcggttaaacaccacgcacgttgccatgcagcgtacgaagaaggccaagaacggccgcctggtgacggtatccgagggtgaagccttgattagccgctacaagatcgtaaagagcgaaaccgggcggccggagtacatcgagatcgagctagctgattggatgtaccgcgagatcacagaaggcaagaacccggacgtgctgacggttcaccccgattactttttgatcgatcccggcatcggccgttttctctaccgcctggcacgccgcgccgcaggcaaggcagaagccagatggttgttcaagacgatctacgaacgcagtggcagcgccggagagttcaagaagttctgtttcaccgtgcgcaagctgatcgggtcaaatgacctgccggagtacgatttgaaggaggaggcggggcaggctggcccgatcctagtcatgcgctaccgcaacctgatcgagggcgaagcatccgccggttcctaatgtacggagcagatgctagggcaaattgccctagcaggggaaaaaggtcgaaaaggtctctttcctgtggatagcacgtacattgggaacccaaagccgtacattgggaaccggaacccgtacattgggaacccaaagccgtacattgggaaccggtcacacatgtaagtgactgatataaaagagaaaaaaggcgatttttccgcctaaaactctttaaaacttattaaaactcttaaaacccgcctggcctgtgcataactgtctggccagcgcacagccgaagagctgcaaaaagcgcctacccttcggtcgctgcgctccctacgccccgccgcttcgcgtcggcctatcgcggccgctggccgctcaaaaatggctggcctacggccaggcaatctaccagggcgcggacaagccgcgccgtcgccactcgaccgccggcgcccacatcaaggcaccctgcctcgcgcgtttcggtgatgacggtgaaaacctctgacacatgcagctcccggagacggtcacagcttgtctgtaagcggatgccgggagcagacaagcccgtcagggcgcgtcagcgggtgttggcgggtgtcggggcgcagccatgacccagtcacgtagcgatagcggagtgtatactggcttaactatgcggcatcagagcagattgtactgagagtgcaccatatgcggtgtgaaataccgcacagatgcgtaaggagaaaataccgcatcaggcgctcttccgcttcctcgctcactgactcgctgcgctcggtcgttcggctgcggcgagcggtatcagctcactcaaaggcggtaatacggttatccacagaatcaggggataacgcaggaaagaacatgtgagcaaaaggccagcaaaaggccaggaaccgtaaaaaggccgcgttgctggcgtttttccataggctccgcccccctgacgagcatcacaaaaatcgacgctcaagtcagaggtggcgaaacccgacaggactataaagataccaggcgtttccccctggaagctccctcgtgcgctctcctgttccgaccctgccgcttaccggatacctgtccgcctttctcccttcgggaagcgtggcgctttctcatagctcacgctgtaggtatctcagttcggtgtaggtcgttcgctccaagctgggctgtgtgcacgaaccccccgttcagcccgaccgctgcgccttatccggtaactatcgtcttgagtccaacccggtaagacacgacttatcgccactggcagcagccactggtaacaggattagcagagcgaggtatgtaggcggtgctacagagttcttgaagtggtggcctaactacggctacactagaaggacagtatttggtatctgcgctctgctgaagccagttaccttcggaaaaagagttggtagctcttgatccggcaaacaaaccaccgctggtagcggtggtttttttgtttgcaagcagcagattacgcgcagaaaaaaaggatctcaagaagatcctttgatcttttctacggggtctgacgctcagtggaacgaaaactcacgttaagggattttggtcatgcattctaggtactaaaacaattcatccagtaaaatataatattttattttctcccaatcaggcttgatccccagtaagtcaaaaaatagctcgacatactgttcttccccgatatcctccctgatcgaccggacgcagaaggcaatgtcataccacttgtccgccctgccgcttctcccaagatcaataaagccacttactttgccatctttcacaaagatgttgctgtctcccaggtcgccgtgggaaaagacaagttcctcttcgggcttttccgtctttaaaaaatcatacagctcgcgcggatctttaaatggagtgtcttcttcccagttttcgcaatccacatcggccagatcgttattcagtaagtaatccaattcggctaagcggctgtctaagctattcgtatagggacaatccgatatgtcgatggagtgaaagagcctgatgcactccgcatacagctcgataatcttttcagggctttgttcatcttcatactcttccgagcaaaggacgccatcggcctcactcatgagcagattgctccagccatcatgccgttcaaagtgcaggacctttggaacaggcagctttccttccagccatagcatcatgtccttttcccgttccacatcataggtggtccctttataccggctgtccgtcatttttaaatataggttttcattttctcccaccagcttatataccttagcaggagacattccttccgtatcttttacgcagcggtatttttcgatcagttttttcaattccggtgatattctcattttagccatttattatttccttcctcttttctacagtatttaaagataccccaagaagctaattataacaagacgaactccaattcactgttccttgcattctaaaaccttaaataccagaaaacagctttttcaaagttgttttcaaagttggcgtataacatagtatcgacggagccgattttgaaaccgcggtgatcacaggcagcaacgctctgtcatcgttacaatcaacatgctaccctccgcgagatcatccgtgtttcaaacccggcagcttagttgccgttcttccgaatagcatcggtaacatgagcaaagtctgccgccttacaacggctctcccgctgacgccgtcccggactgatgggctgcctgtatcgagtggtgattttgtgccgagctgccggtcggggagctgttggctggctggtggcaggatatattgtggtgtaaacaaattgacgcttagacaacttaataacacattgcggacgtttttaatgtactgaattaacgccgaattactagatatcgatttggtgtatcgagattggttatgaaattcagatgctagtgtaatgtattggtaatttgggaagatataataggaagcaaggctatttatccatttctgaaaaggcgaaatggcgtcaccgcgagcgtcacgcgcattccgttcttgctgtaaagcgttgtttggtacacttttgactagcgaggcttggcgtgtcagcgtatctattcaaaagtcgttaatggctgcggatcaagaaaaagttggaatagaaacagaatacccgcgaaattcaggcccggttgccatgtcctacacgccgaaataaacgaccaaattagtagaaaaataaaaactgactcggatacttacgtcacgtcttgcgcactgatttgaaaaatctcaatataaacaaagacggccacaagaaaaaaccaaaacaccgatattcattaatcttatctagtttctcaaaaaaattcatatcttccacacgtggatccgtcgagtctaccatgagcccagaacgacgcccggccgacatccgccgtgccaccgaggcggacatgccggcggtctgcaccatcgtcaaccactacatcgagacaagcacggtcaacttccgtaccgagccgcaggaaccgcaggagtggacggacgacctcgtccgtctgcgggagcgctatccctggctcgtcgccgaggtggacggcgaggtcgccggcatcgcctacgcgggcccctggaaggcacgcaacgcctacgactggacggccgagtcgaccgtgtacgtctccccccgccaccagcggacgggactgggctccacgctctacacccacctgctgaagtccctggaggcacagggcttcaagagcgtggtcgctgtcatcgggctgcccaacgacccgagcgtgcgcatgcacgaggcgctcggatatgccccccgcggcatgctgcgggcggccggcttcaagcacgggaactggcatgacgtgggtttctggcagctggacttcagcctgccggtaccgccccgtccggtcctgcccgtcaccgagatttgactcgaccggcatgccctgctttaatgagatatgcgagacgcctatgatcgcatgatatttgctttcaattctgttgtgcacgttgtaaaaaacctgagcatgtgtagctcagatccttaccgccggtttcggttcattctaatgaatatatcacccgttactatcgtatttttatgaataatattctccgttcaatttactgattgtccaagcttaatgtgagttagctcactcattaggcaccccaggctttacactttatgcttccggctcgtatgttgtgtggaattgtgagcggataacaatttcacacaggaaacagctatgacatgattacgaattcgagctcggtacccggggatcctctagagtcgacctgcaggcatgcaagcttggcactggccgtcgttttacaacgtcgtgactgggaaaaccctggcgttacccaacttaatcgccttgcagcacatccccctttcgccagctggcgtaatagcgaagaggcccgcaccgatcgcccttcccaacagttgcgcagcctgaatggcgaatgctagagcagcttgagcttggatcagattgtcgtttcccgccttcagtttaaactatcagtgtttgacaggatatattggcgggtaaacctaagagaaaagagcgtttattagaataacggatatttaaaagggcgtgaaaaggtttatccgttcgtccatttgtatgtgcatgccaaccacagggttcccctcgggatcaaagt

SEQ ID NO: 2 - DNA, 8885 bp, Artificial Sequence
  vector used for antisense expression and co-suppression experiments
  polyA_signal (48)..(317): Nos 3' terminator
  primer_bind (67)..(86): ORF ID nested
  misc_feature (572)..(597): T-DNA right border
  misc_feature (1638)..(2638): pVS1 sta
  rep_origin (3231)..(4231): pVS1
  misc_feature (4641)..(4901): pBR322 bom
  rep_origin (5041)..(5321): pBR322
  misc_feature (5615)..(6406): Kanamycin resistance
  misc_feature (6831)..(6856): T-DNA left border
  polyA_signal (6924)..(7137): OCSpA
  misc_feature (7139)..(7690): bar
  promoter (7704)..(7888): mas1'del100
  promoter (7895)..(8885): PcUbi4-2
  primer_bind (8809)..(8831): PcUbi foreward
  primer_bind (8835)..(8863): PcUbi foreward nested
gggttgctcttccatggcaatgattaattaacgaagagcaagagctcgaatttccccgatcgttcaaacatttggcaataaagtttcttaagattgaatcctgttgccggtcttgcgatgattatcatataatttctgttgaattacgttaagcatgtaataattaacatgtaatgcatgacgttatttatgagatgggtttttatgattagagtcccgcaattatacatttaatacgcgatagaaaacaaaatatagcgcgcaaactaggataaattatcgcgcgcggtgtcatctatgttactagatcgggaattggcatgcaagcttggcactggccgtcgttttacaacgtcgtgactgggaaaaccctggcgttacccaacttaatcgccttgcagcacatccccctttcgccagctggcgtaatagcgaagaggcccgcaccgatcgcccttcccaacagttgcgcagcctgaatggcgaatgctagagcagcttgagcttggatcagattgtcgtttcccgccttcagtttaaactatcagtgtttgacaggatatattggcgggtaaacctaagagaaaagagcgtttattagaataacggatatttaaaagggcgtgaaaaggtttatccgttcgtccatttgtatgtgcatgccaaccacagggttcccctcgggatcaaagtactttgatccaacccctccgctgctatagtgcagtcggcttctgacgttcagtgcagccgtcttctgaaaacgacatgtcgcacaagtcctaagttacgcgacaggctgccgccctgcccttttcctggcgttttcttgtcgcgtgttttagtcgcataaagtagaatacttgcgactagaaccggagacattacgccatgaacaagagcgccgccgctggcctgctgggctatgcccgcgtcagcaccgacgaccaggacttgaccaaccaacgggccgaactgcacgcggccggctgcaccaagctgttttccgagaagatcaccggcaccaggcgcgaccgcccggagctggccaggatgcttgaccacctacgccctggcgacgttgtgacagtgaccaggctagaccgcctggcccgcagcacccgcgacctactggacattgccgagcgcatccaggaggccggcgcgggcctgcgtagcctggcagagccgtgggccgacaccaccacgccggccggccgcatggtgttgaccgtgttcgccggcattgccgagttcgagcgttccctaatcatcgaccgcacccggagcgggcgcgaggccgccaaggcccgaggcgtgaagtttggcccccgccctaccctcaccccggcacagatcgcgcacgcccgcgagctgatcgaccaggaaggccgcaccgtgaaagaggcggctgcactgcttggcgtgcatcgctcgaccctgtaccgcgcacttgagcgcagcgaggaagtgacgcccaccgaggccaggcggcgcggtgccttccgtgaggacgcattgaccgaggccgacgccctggcggccgccgagaatgaacgccaagaggaacaagcatgaaaccgcaccaggacggccaggacgaaccgtttttcattaccgaagagatcgaggcggagatgatcgcggccgggtacgtgttcgagccgcccgcgcacgtctcaaccgtgcggctgcatgaaatcctggccggtttgtctgatgccaagctggcggcctggccggccagcttggccgctgaagaaaccgagcgccgccgtctaaaaaggtgatgtgtatttgagtaaaacagcttgcgtcatgcggtcgctgcgtatatgatgcgatgagtaaataaacaaatacgcaaggggaacgcatgaaggttatcgctgtacttaaccagaaaggcgggtcaggcaagacgaccatcgcaacccatctagcccgcgccctgcaactcgccggggccgatgttctgttagtcgattccgatccccagggcagtgcccgcgattgggcggccgtgcgggaagatcaaccgctaaccgttgtcggcatcgaccgcccgacgattgaccgcgacgtgaaggccatcggccggcgcgacttcgtagtgatcgacggagcgccccaggcggcggacttggctgtgtccgcgatcaaggcagccgacttcgtgctgattccggtgcagccaagcccttacgacatatgggccaccgccgacctggtggagctggttaagcagcgcattgaggtcacggatggaaggctacaagcggcctttgtcgtgtcgcgggcgatcaaaggcacgcgcatcggcggtgaggttgccgaggcgctggccgggtacgagctgcccattcttgagtcccgtatcacgcagcgcgtgagctacccaggcactgccgccgccggcacaaccgttcttgaatcagaacccgagggcgacgctgcccgcgaggtccaggcgctggccgctgaaattaaatcaaaactcatttgagttaatgaggtaaagagaaaatgagcaaaagcacaaacacgctaagtgccggccgtccgagcgcacgcagcagcaaggctgcaacgttggccagcctggcagacacgccagccatgaagcgggtcaactttcagttgccggcggaggatcacaccaagctgaagatgtacgcggtacgccaaggcaagaccattaccgagctgctatctgaatacatcgcgcagctaccagagtaaatgagcaaatgaataaatgagtagatgaattttagcggctaaaggaggcggcatggaaaatcaagaacaaccaggcaccgacgccgtggaatgccccatgtgtggaggaacgggcggttggccaggcgtaagcggctgggttgtctgccggccctgcaatggcactggaacccccaagcccgaggaatcggcgtgacggtcgcaaaccatccggcccggtacaaatcggcgcggcgctgggtgatgacctggtggagaagttgaaggccgcgcaggccgcccagcggcaacgcatcgaggcagaagcacgccccggtgaatcgtggcaagcggccgctgatcgaatccgcaaagaatcccggcaaccgccggcagccggtgcgccgtcgattaggaagccgcccaagggcgacgagcaaccagattttttcgttccgatgctctatgacgtgggcacccgcgatagtcgcagcatcatggacgtggccgttttccgtctgtcgaagcgtgaccgacgagctggcgaggtgatccgctacgagcttccagacgggcacgtagaggtttccgcagggccggccggcatggccagtgtgtgggattacgacctggtactgatggcggtttcccatctaaccgaatccatgaaccgataccgggaagggaagggagacaagcccggccgcgtgttccgtccacacgttgcggacgtactcaagttctgccggcgagccgatggcggaaagcagaaagacgacctggtagaaacctgcattcggttaaacaccacgcacgttgccatgcagcgtacgaagaaggccaagaacggccgcctggtgacggtatccgagggtgaagccttgattagccgctacaagatcgtaaagagcgaaaccgggcggccggagtacatcgagatcgagctagctgattggatgtaccgcgagatcacagaaggcaagaacccggacgtgctgacggttcaccccgattactttttgatcgatcccggcatcggccgttttctctaccgcctggcacgccgcgccgcaggcaaggcagaagccagatggttgttcaagacgatctacgaacgcagtggcagcgccggagagttcaagaagttctgtttcaccgtgcgcaagctgatcgggtcaaatgacctgccggagtacgatttgaaggaggaggcggggcaggctggcccgatcctagtcatgcgctaccgcaacctgatcgagggcgaagcatccgccggttcctaatgtacggagcagatgctagggcaaattgccctagcaggggaaaaaggtcgaaaaggtctctttcctgtggatagcacgtacattgggaacccaaagccgtacattgggaaccggaacccgtacattgggaacccaaagccgtacattgggaaccggtcacacatgtaagtgactgatataaaagagaaaaaaggcgatttttccgcctaaaactctttaaaacttattaaaactcttaaaacccgcctggcctgtgcataactgtctggccagcgcacagccgaagagctgcaaaaagcgcctacccttcggtcgctgcgctccctacgccccgccgcttcgcgtcggcctatcgcggccgctggccgctcaaaaatggctggcctacggccaggcaatctaccagggcgcggacaagccgcgccgtcgccactcgaccgccggcgcccacatcaaggcaccctgcctcgcgcgtttcggtgatgacggtgaaaacctctgacacatgcagctcccggagacggtcacagcttgtctgtaagcggatgccgggagcagacaagcccgtcagggcgcgtcagcgggtgttggcgggtgtcggggcgcagccatgacccagtcacgtagcgatagcggagtgtatactggcttaactatgcggcatcagagcagattgtactgagagtgcaccatatgcggtgtgaaataccgcacagatgcgtaaggagaaaataccgcatcaggcgctcttccgcttcctcgctcactgactcgctgcgctcggtcgttcggctgcggcgagcggtatcagctcactcaaaggcggtaatacggttatccacagaatcaggggataacgcaggaaagaacatgtgagcaaaaggccagcaaaaggccaggaaccgtaaaaaggccgcgttgctggcgtttttccataggctccgcccccctgacgagcatcacaaaaatcgacgctcaagtcagaggtggcgaaacccgacaggactataaagataccaggcgtttccccctggaagctccctcgtgcgctctcctgttccgaccctgccgcttaccggatacctgtccgcctttctcccttcgggaagcgtggcgctttctcatagctcacgctgtaggtatctcagttcggtgtaggtcgttcgctccaagctgggctgtgtgcacgaaccccccgttcagcccgaccgctgcgccttatccggtaactatcgtcttgagtccaacccggtaagacacgacttatcgccactggcagcagccactggtaacaggattagcagagcgaggtatgtaggcggtgctacagagttcttgaagtggtggcctaactacggctacactagaaggacagtatttggtatctgcgctctgctgaagccagttaccttcggaaaaagagttggtagctcttgatccggcaaacaaaccaccgctggtagcggtggtttttttgtttgcaagcagcagattacgcgcagaaaaaaaggatctcaagaagatcctttgatcttttctacggggtctgacgctcagtggaacgaaaactcacgttaagggattttggtcatgcattctaggtactaaaacaattcatccagtaaaatataatattttattttctcccaatcaggcttgatccccagtaagtcaaaaaatagctcgacatactgttcttccccgatatcctccctgatcgaccggacgcagaaggcaatgtcataccacttgtccgccctgccgcttctcccaagatcaataaagccacttactttgccatctttcacaaagatgttgctgtctcccaggtcgccgtgggaaaagacaagttcctcttcgggcttttccgtctttaaaaaatcatacagctcgcgcggatctttaaatggagtgtcttcttcccagttttcgcaatccacatcggccagatcgttattcagtaagtaatccaattcggctaagcggctgtctaagctattcgtatagggacaatccgatatgtcgatggagtgaaagagcctgatgcactccgcatacagctcgataatcttttcagggctttgttcatcttcatactcttccgagcaaaggacgccatcggcctcactcatgagcagattgctccagccatcatgccgttcaaagtgcaggacctttggaacaggcagctttccttccagccatagcatcatgtccttttcccgttccacatcataggtggtccctttataccggctgtccgtcatttttaaatataggttttcattttctcccaccagcttatataccttagcaggagacattccttccgtatcttttacgcagcggtatttttcgatcagttttttcaattccggtgatattctcattttagccatttattatttccttcctcttttctacagtatttaaagataccccaagaagctaattataacaagacgaactccaattcactgttccttgcattctaaaaccttaaataccagaaaacagctttttcaaagttgttttcaaagttggcgtataacatagtatcgacggagccgattttgaaaccgcggtgatcacaggcagcaacgctctgtcatcgttacaatcaacatgctaccctccgcgagatcatccgtgtttcaaacccggcagcttagttgccgttcttccgaatagcatcggtaacatgagcaaagtctgccgccttacaacggctctcccgctgacgccgtcccggactgatgggctgcctgtatcgagtggtgattttgtgccgagctgccggtcggggagctgttggctggctggtggcaggatatattgtggtgtaaacaaattgacgcttagacaacttaataacacattgcggacgtttttaatgtactgaattaacgccgaattaagcttggacaatcagtaaattgaacggagaatattattcataaaaatacgatagtaacgggtgatatattcattagaatgaaccgaaaccggcggtaaggatctgagctacacatgctcaggttttttacaacgtgcacaacagaattgaaagcaaatatcatgcgatcataggcgtctcgcatatctcattaaagcagggcatgccggtcgagtcaaatctcggtgacgggcaggaccggacggggcggtaccggcaggctgaagtccagctgccagaaacccacgtcatgccagttcccgtgcttgaagccggccgcccgcagcatgccgcggggggcatatccgagcgcctcgtgcatgcgcacgctcgggtcgttgggcagcccgatgacagcgaccacgctcttgaagccctgtgcctccagggacttcagcaggtgggtgtagagcgtggagcccagtcccgtccgctggtggcggggggagacgtacacggtcgactcggccgtccagtcgtaggcgttgcgtgccttccaggggcccgcgtaggcgatgccggcgacctcgccgtccacctcggcgacgagccagggatagcgctcccgcagacggacgaggtcgtccgtccactcctgcggttcctgcggctcggtacggaagttgaccgtgcttgtctcgatgtagtggttgacgatggtgcagaccgccggcatgtccgcctcggtggcacggcggatgtcggccgggcgtcgttctgggctcatggtagactcgacggatccacgtgtggaagatatgaatttttttgagaaactagataagattaatgaatatcggtgttttggttttttcttgtggccgtctttgtttatattgagatttttcaaatcagtgcgcaagacgtgacgtaagtatccgagtcagtttttatttttctactaatttggtcgaagctttgggcggatcctctagagaattcgaatccaaaaattacggatatgaatataggcatatccgtatccgaattatccgtttgacagctagcaacgattgtacaattgcttctttaaaaaaggaagaaagaaagaaagaaaagaatcaacatcagcgttaacaaacggccccgttacggcccaaacggtcatatagagtaacggcgttaagcgttgaaagactcctatcgaaatacgtaaccgcaaacgtgtcatagtcagatcccctcttccttcaccgcctcaaacacaaaaataatcttctacagcctatatatacaacccccccttctatctctcctttctcacaattcatcatctttctttctctacccccaattttaagaaatcctctcttctcctcttcattttcaaggtaaatctctctctctctctctctctctgttattccttgttttaattaggtatgtattattgctagtttgttaatctgcttatcttatgtatgccttatgtgaatatctttatcttgttcatctcatccgtttagaagctataaatttgttgatttgactgtgtatctacacgtggttatgtttatatctaatcagatatgaatttcttcatattgttgcgtttgtgtgtaccaatccgaaatcgttgatttttttcatttaatcgtgtagctaattgtacgtatacatatggatctacgtatcaattgttcatctgtttgtgtttgtatgtatacagatctgaaaacatcacttctctcatctgattgtgttgttacatacatagatatagatctgttatatcattttttttattaattgtgtatatatatatgtgcatagatctggattacatgattgtgattatttacatgattttgttatttacgtatgtatatatgtagatctggactttttggagttgttgacttgattgtatttgtgtgtgtatatgtgtgttctgatcttgatatgttatgtatgtgcagccc

SEQ ID NO: 3 - DNA, 8422 bp, Artificial Sequence
  vector used for RNAi experiments
  promoter (18)..(1008): PcUbi4-2
  Intron (1009)..(1543): Spacer
  polyA_signal (1545)..(1814): Nos 3' terminator
  misc_feature (2069)..(2094): T-DNA right border
  misc_feature (3135)..(4135): pVS1 sta
  rep_origin (4728)..(5728): pVS1
  misc_feature (6138)..(6398): pBR322 bom
  rep_origin (6538)..(6818): pBR322
  misc_feature (7112)..(7903): Kanamycin resistance
  misc_feature (8328)..(8353): T-DNA left border
agctttgggcggatcctctagagaattcgaatccaaaaattacggatatgaatataggcatatccgtatccgaattatccgtttgacagctagcaacgattttacaattgcttctttaaaaaaggaagaaagaaagaaagaaaagaatcaacatcagcgttaacaaacggccccgttacggcccaaacggtcatatagagtaacggcgttaagcgttgaaagactcctatcgaaatacgtaaccgcaaacgtgtcatagtcagatcccctcttccttcaccgcctcaaacacaaaaataatcttctacagcctatatatacaacccccccttctatctctcctttctcacaattcatcatctttctttctctacccccaattttaagaaatcctctcttctcctcttcattttcaaggtaaatctctctctctctctctctctctgttattccttgttttaattaggtatgtattattgctagtttgttaatctgcttatcttatgtatgccttatgtgaatatctttatcttgttcatctcatccgtttagaagctataaatttgttgatttgactgtgtatctacacgtggttatgtttatatctaatcagatatgaatttcttcatattgttgcgtttgtgtgtaccaatccgaaatcgttgatttttttcatttaatcgtgtagctaattgtacgtatacatatggatctacgtatcaattgttcatctgtttgtgtttgtatgtatacagatctgaaaacatcacttctctcatctgattgtgttgttacatacatagatatagatctgttatatcattttttttattaattgtgtatatatatatgtgcatagatctggattacatgattgtgattatttacatgattttgttatttacgtatgtatatatgtagatctggactttttggagttgttgacttgattgtatttgtgtgtgtatatgtgtgttctgatcttgatatgttatgtatgtgcagcccgggtaccgtcgaccaaaaatgtaactaatagcggcaacttggattcgacttcttcttcgacagggtcaataacagaggacgaaaaaagatcagaaccgaatgcagattccaataacatgacagggggcgagccaattgacccaagagatctcgattgggacgggcccgatgacccagacaatccgcataattggtcctctttgaagaaatggtatactactatgacttcagcttttctttgtttggtcgtcacaatgggtagttccctatatgtttcttccgtaccagaattggtagaaagatatcacgttagtcagactttggcgcttgctggtttaactttctatcttctgggtttatcgactgtcatcggcgctccattaagtgaagtgtttggtcgtaagcctgtctatttattttccctacctgtgtcaatgcttttcaccatgggtgttgggttatccaatggccacatgagaataattctacccctaaggtttttatcaggtgtctttgcactcgagtgtacagagctcgaatttccccgatcgttcaaacatttggcaataaagtttcttaagattgaatcctgttgccggtcttgcgatgattatcatataatttctgttgaattacgttaagcatgtaataattaacatgtaatgcatgacgttatttatgagatgggtttttatgattagagtcccgcaattatacatttaatacgcgatagaaaacaaaatatagcgcgcaaactaggataaattatcgcgcgcggtgtcatctatgttactagatcgggaattggcatgcaagcttggcactggccgtcgttttacaacgtcgtgactgggaaaaccctggcgttacccaacttaatcgccttgcagcacatccccctttcgccagctggcgtaatagcgaagaggcccgcaccgatcgcccttcccaacagttgcgcagcctgaatggcgaatgctagagcagcttgagcttggatcagattgtcgtttcccgccttcagtttaaactatcagtgtttgacaggatatattggcgggtaaacctaagagaaaagagcgtttattagaataacggatatttaaaagggcgtgaaaaggtttatccgttcgtccatttgtatgtgcatgccaaccacagggttcccctcgggatcaaagtactttgatccaacccctccgctgctatagtgcagtcggcttctgacgttcagtgcagccgtcttctgaaaacgacatgtcgcacaagtcctaagttacgcgacaggctgccgccctgcccttttcctggcgttttcttgtcgcgtgttttagtcgcataaagtagaatacttgcgactagaaccggagacattacgccatgaacaagagcgccgccgctggcctgctgggctatgcccgcgtcagcaccgacgaccaggacttgaccaaccaacgggccgaactgcacgcggccggctgcaccaagctgttttccgagaagatcaccggcaccaggcgcgaccgcccggagctggccaggatgcttgaccacctacgccctggcgacgttgtgacagtgaccaggctagaccgcctggcccgcagcacccgcgacctactggacattgccgagcgcatccaggaggccggcgcgggcctgcgtagcctggcagagccgtgggccgacaccaccacgccggccggccgcatggtgttgaccgtgttcgccggcattgccgagttcgagcgttccctaatcatcgaccgcacccggagcgggcgcgaggccgccaaggcccgaggcgtgaagtttggcccccgccctaccctcaccccggcacagatcgcgcacgcccgcgagctgatcgaccaggaaggccgcaccgtgaaagaggcggctgcactgcttggcgtgcatcgctcgaccctgtaccgcgcacttgagcgcagcgaggaagtgacgcccaccgaggccaggcggcgcggtgccttccgtgaggacgcattgaccgaggccgacgccctggcggccgccgagaatgaacgccaagaggaacaagcatgaaaccgcaccaggacggccaggacgaaccgtttttcattaccgaagagatcgaggcggagatgatcgcggccgggtacgtgttcgagccgcccgcgcacgtctcaaccgtgcggctgcatgaaatcctggccggtttgtctgatgccaagctggcggcctggccggccagcttggccgctgaagaaaccgagcgccgccgtctaaaaaggtgatgtgtatttgagtaaaacagcttgcgtcatgcggtcgctgcgtatatgatgcgatgagtaaataaacaaatacgcaaggggaacgcatgaaggttatcgctgtacttaaccagaaaggcgggtcaggcaagacgaccatcgcaacccatctagcccgcgccctgcaactcgccggggccgatgttctgttagtcgattccgatccccagggcagtgcccgcgattgggcggccgtgcgggaagatcaaccgctaaccgttgtcggcatcgaccgcccgacgattgaccgcgacgtgaaggccatcggccggcgcgacttcgtagtgatcgacggagcgccccaggcggcggacttggctgtgtccgcgatcaaggcagccgacttcgtgctgattccggtgcagccaagcccttacgacatatgggccaccgccgacctggtggagctggttaagcagcgcattgaggtcacggatggaaggctacaagcggcctttgtcgtgtcgcgggcgatcaaaggcacgcgcatcggcggtgaggttgccgaggcgctggccgggtacgagctgcccattcttgagtcccgtatcacgcagcgcgtgagctacccaggcactgccgccgccggcacaaccgttcttgaatcagaacccgagggcgacgctgcccgcgaggtccaggcgctggccgctgaaattaaatcaaaactcatttgagttaatgaggtaaagagaaaatgagcaaaagcacaaacacgctaagtgccggccgtccgagcgcacgcagcagcaaggctgcaacgttggccagcctggcagacacgccagccatgaagcgggtcaactttcagttgccggcggaggatcacaccaagctgaagatgtacgcggtacgccaaggcaagaccattaccgagctgctatctgaatacatcgcgcagctaccagagtaaatgagcaaatgaataaatgagtagatgaattttagcggctaaaggaggcggcatggaaaatcaagaacaaccaggcaccgacgccgtggaatgccccatgtgtggaggaacgggcggttggccaggcgtaagcggctgggttgtctgccggccctgcaatggcactggaacccccaagcccgaggaatcggcgtgacggtcgcaaaccatccggcccggtacaaatcggcgcggcgctgggtgatgacctggtggagaagttgaaggccgcgcaggccgcccagcggcaacgcatcgaggcagaagcacgccccggtgaatcgtggcaagcggccgctgatcgaatccgcaaagaatcccggcaaccgccggcagccggtgcgccgtcgattaggaagccgcccaagggcgacgagcaaccagattttttcgttccgatgctctatgacgtgggcacccgcgatagtcgcagcatcatggacgtggccgttttccgtctgtcgaagcgtgaccgacgagctggcgaggtgatccgctacgagcttccagacgggcacgtagaggtttccgcagggccggccggcatggccagtgtgtgggattacgacctggtactgatggcggtttcccatctaaccgaatccatgaaccgataccgggaagggaagggagacaagcccggccgcgtgttccgtccacacgttgcggacgtactcaagttctgccggcgagccgatggcggaaagcagaaagacgacctggtagaaacctgcattcggttaaacaccacgcacgttgccatgcagcgtacgaagaaggccaagaacggccgcctggtgacggtatccgagggtgaagccttgattagccgctacaagatcgtaaagagcgaaaccgggcggccggagtacatcgagatcgagctagctgattggatgtaccgcgagatcacagaaggcaagaacccggacgtgctgacggttcaccccgattactttttgatcgatcccggcatcggccgttttctctaccgcctggcacgccgcgccgcaggcaaggcagaagccagatggttgttcaagacgatctacgaacgcagtggcagcgccggagagttcaagaagttctgtttcaccgtgcgcaagctgatcgggtcaaatgacctgccggagtacgatttgaaggaggaggcggggcaggctggcccgatcctagtcatgcgctaccgcaacctgatcgagggcgaagcatccgccggttcctaatgtacggagcagatgctagggcaaattgccctagcaggggaaaaaggtcgaaaaggtctctttcctgtggatagcacgtacattgggaacccaaagccgtacattgggaaccggaacccgtacattgggaacccaaagccgtacattgggaaccggtcacacatgtaagtgactgatataaaagagaaaaaaggcgatttttccgcctaaaactctttaaaacttattaaaactcttaaaacccgcctggcctgtgcataactgtctggccagcgcacagccgaagagctgcaaaaagcgcctacccttcggtcgctgcgctccctacgccccgccgcttcgcgtcggcctatcgcggccgctggccgctcaaaaatggctggcctacggccaggcaatctaccagggcgcggacaagccgcgccgtcgccactcgaccgccggcgcccacatcaaggcaccctgcctcgcgcgtttcggtgatgacggtgaaaacctctgacacatgcagctcccggagacggtcacagcttgtctgtaagcggatgccgggagcagacaagcccgtcagggcgcgtcagcgggtgttggcgggtgtcggggcgcagccatgacccagtcacgtagcgatagcggagtgtatactggcttaactatgcggcatcagagcagattgtactgagagtgcaccatatgcggtgtgaaataccgcacagatgcgtaaggagaaaataccgcatcaggcgctcttccgcttcctcgctcactgactcgctgcgctcggtcgttcggctgcggcgagcggtatcagctcactcaaaggcggtaatacggttatccacagaatcaggggataacgcaggaaagaacatgtgagcaaaaggccagcaaaaggccaggaaccgtaaaaaggccgcgttgctggcgtttttccataggctccgcccccctgacgagcatcacaaaaatcgacgctcaagtcagaggtggcgaaacccgacaggactataaagataccaggcgtttccccctggaagctccctcgtgcgctctcctgttccgaccctgccgcttaccggatacctgtccgcctttctcccttcgggaagcgtggcgctttctcatagctcacgctgtaggtatctcagttcggtgtaggtcgttcgctccaagctgggctgtgtgcacgaaccccccgttcagcccgaccgctgcgccttatccggtaactatcgtcttgagtccaacccggtaagacacgacttatcgccactggcagcagccactggtaacaggattagcagagcgaggtatgtaggcggtgctacagagttcttgaagtggtggcctaactacggctacactagaaggacagtatttggtatctgcgctctgctgaagccagttaccttcggaaaaagagttggtagctcttgatccggcaaacaaaccaccgctggtagcggtggtttttttgtttgcaagcagcagattacgcgcagaaaaaaaggatctcaagaagatcctttgatcttttctacggggtctgacgctcagtggaacgaaaactcacgttaagggattttggtcatgcattctaggtactaaaacaattcatccagtaaaatataatattttattttctcccaatcaggcttgatccccagtaagtcaaaaaatagctcgacatactgttcttccccgatatcctccctgatcgaccggacgcagaaggcaatgtcataccacttgtccgccctgccgcttctcccaagatcaataaagccacttactttgccatctttcacaaagatgttgctgtctcccaggtcgccgtgggaaaagacaagttcctcttcgggcttttccgtctttaaaaaatcatacagctcgcgcggatctttaaatggagtgtcttcttcccagttttcgcaatccacatcggccagatcgttattcagtaagtaatccaattcggctaagcggctgtctaagctattcgtatagggacaatccgatatgtcgatggagtgaaagagcctgatgcactccgcatacagctcgataatcttttcagggctttgttcatcttcatactcttccgagcaaaggacgccatcggcctcactcatgagcagattgctccagccatcatgccgttcaaagtgcaggacctttggaacaggcagctttccttccagccatagcatcatgtccttttcccgttccacatcataggtggtccctttataccggctgtccgtcatttttaaatataggttttcattttctcccaccagcttatataccttagcaggagacattccttccgtatcttttacgcagcggtatttttcgatcagttttttcaattccggtgatattctcattttagccatttattatttccttcctcttttctacagtatttaaagataccccaagaagctaattataacaagacgaactccaattcactgttccttgcattctaaaaccttaaataccagaaaacagctttttcaaagttgttttcaaagttggcgtataacatagtatcgacggagccgattttgaaaccgcggtgatcacaggcagcaacgctctgtcatcgttacaatcaacatgctaccctccgcgagatcatccgtgtttcaaacccggcagcttagttgccgttcttccgaatagcatcggtaacatgagcaaagtctgccgccttacaacggctctcccgctgacgccgtcccggactgatgggctgcctgtatcgagtggtgattttgtgccgagctgccggtcggggagctgttggctggctggtggcaggatatattgtggtgtaaacaaattgacgcttagacaacttaatacgtaagtatccgagtcagtttttatttttctactaatttggtcga

SEQ ID NO: 4 - DNA, 21 bp, Artificial Sequence
  Primer used for identification of the T-DNA insertion site in the genome of Arabidopsis knock-out lines
tgacgccatttcgccttttca

SEQ ID NO: 5 - DNA, 23 bp, Artificial Sequence
  Primer used for identification of the T-DNA insertion site in the genome of Arabidopsis knock-out lines
caacttaatcgccttgcagcaca

SEQ ID NO: 6 - DNA, 27 bp, Artificial Sequence
  Primer used for identification of the T-DNA insertion site in the genome of Arabidopsis knock-out lines
cagaaatggataaatagccttgcttcc

SEQ ID NO: 7 - DNA, 21 bp, Artificial Sequence
  Primer used for identification of the T-DNA insertion site in the genome of Arabidopsis knock-out lines
agctggcgtaatagcgaagag

SEQ ID NO: 8 - DNA, 23 bp, Artificial Sequence
  Primer used for identification of the T-DNA insertion site in the genome of Arabidopsis knock-out lines
ccaatacattacactagcatctg

SEQ ID NO: 9 - DNA, 18 bp, Artificial Sequence
  Primer used for identification of the T-DNA insertion site in the genome of Arabidopsis knock-out lines
aatgctagagcagcttga

SEQ ID NO: 10 - DNA, 22 bp, Artificial Sequence
  Primer used for identification of the T-DNA insertion site in the genome of Arabidopsis knock-out lines
caatacattacactagcatctg

SEQ ID NO: 11 - DNA, 18 bp, Artificial Sequence
  Primer used for identification of the T-DNA insertion site in the genome of Arabidopsis knock-out lines
agaggcccgcaccgatcg

SEQ ID NO: 12 - DNA, 22 bp, Artificial Sequence
  Primer used for identification of the T-DNA insertion site in the genome of Arabidopsis knock-out lines
ctagcatctgaatttcataacc

SEQ ID NO: 13 - DNA, 21 bp, Artificial Sequence
  Primer used for identification of the T-DNA insertion site in the genome of Arabidopsis knock-out lines
gcttgagcttggatcagattg

SEQ ID NO: 14 - DNA, 16 bp, Artificial Sequence
  Primer used for identification of the T-DNA insertion site in the genome of Arabidopsis knock-out lines
  misc_feature (1)..(1): n is a, c, g, or t
  misc_feature (11)..(11): n is a, c, g, or t
ngtcgaswganawgaa

SEQ ID NO: 15 - DNA, 16 bp, Artificial Sequence
  Primer used for identification of the T-DNA insertion site in the genome of Arabidopsis knock-out lines
  misc_feature (5)..(5): n is a, c, g, or t
  misc_feature (10)..(10): n is a, c, g, or t
  misc_feature (13)..(13): n is a, c, g, or t
wgtgnagwancanaga

SEQ ID NO: 16 - DNA, 16 bp, Artificial Sequence
  Primer used for identification of the T-DNA insertion site in the genome of Arabidopsis knock-out lines
  misc_feature (5)..(5): n is a, c, g, or t
  misc_feature (10)..(10): n is a, c, g, or t
  misc_feature (13)..(13): n is a, c, g, or t
sttgntastnctntgc

SEQ ID NO: 17 - DNA, 16 bp, Artificial Sequence
  Primer used for identification of the T-DNA insertion site in the genome of Arabidopsis knock-out lines
  misc_feature (5)..(5): n is a, c, g, or t
  misc_feature (10)..(10): n is a, c, g, or t
  misc_feature (13)..(13): n is a, c, g, or t
agwgnagwancanaga

SEQ ID NO: 18 - DNA, 16 bp, Artificial Sequence
  Primer used for identification of the T-DNA insertion site in the genome of Arabidopsis knock-out lines
  misc_feature (1)..(1): n is a, c, g, or t
  misc_feature (11)..(11): n is a, c, g, or t
ntgcgaswganwagaa

SEQ ID NO: 19 - DNA, 16 bp, Artificial Sequence
  Primer used for identification of the T-DNA insertion site in the genome of Arabidopsis knock-out lines
  misc_feature (1)..(1): n is a, c, g, or t
  misc_feature (11)..(11): n is a, c, g, or t
ntgcgaswgantagaa

SEQ ID NO: 20 - DNA, 17 bp, Artificial Sequence
  Primer used for identification of the T-DNA insertion site in the genome of Arabidopsis knock-out lines
  misc_feature (9)..(9): n is a, c, g, or t
sstggstanatwatwct

SEQ ID NO: 21 - DNA, 9 bp, Artificial Sequence
  Extension of 5 prime primer for amplification of antisense fragments from gene of interest
atacccggg

SEQ ID NO: 22 - DNA, 9 bp, Artificial Sequence
  extension of 3 prime primer for amplification of antisense fragments from gene of interest
atagagctc

SEQ ID NO: 23 - DNA, 9 bp, Artificial Sequence
  extension of 5 prime primer for amplification of  RNAi fragments from gene of interest
ataggtacc

SEQ ID NO: 24 - DNA, 9 bp, Artificial Sequence
  extension of 3 prime primer for amplification of  RNAi fragments from gene of interest
atagtcgac

SEQ ID NO: 25 - DNA, 9 bp, Artificial Sequence
  extension of 5 prime primer for amplification of cosuppression fragments from gene of interest
ataccatgg

SEQ ID NO: 26 - DNA, 11 bp, Artificial Sequence
  extension of 3 prime primer for amplification of cosuppression fragments from gene of interest
atattaattaa

SEQ ID NO: 27 - DNA, 1773 bp, Arabidopsis thaliana
  CDS (1)..(1773)
atgtctcttcctgaaactaaatctgatgatatccttcttgatgcttgggacttccaaggccgtcccgccgatcgctcaaaaaccggcggctgggccagcgccgccatgattctttgtattgaggccgtggagaggctgacgacgttaggtatcggagttaatctggtgacgtatttgacgggaactatgcatttaggcaatgcaactgcggctaacaccgttaccaatttcctcggaacttctttcatgctctgtctcctcggtggcttcatcgccgatacctttctcggcaggtacctaacgattgctatattcgccgcaatccaagccacgggtgtttcaatcttaactctatcaacaatcataccgggacttcgaccaccaagatgcaatccaacaacgtcgtctcactgcgaacaagcaagtggaatacaactgacggtcctatacttagccttatacctcaccgctctaggaacgggaggcgtgaaggctagtgtctcgggtttcgggtcggaccaattcgatgagaccgaaccaaaagaacgatcgaaaatgacatatttcttcaaccgtttcttcttttgtatcaacgttggctctcttttagctgtgacggtccttgtctacgtacaagacgatgttggacgcaaatggggctatggaatttgcgcgtttgcgatcgtgcttgcactcagcgttttcttggccggaacaaaccgctaccgtttcaagaagttgatcggtagcccgatgacgcaggttgctgcggttatcgtggcggcgtggaggaataggaagctcgagctgccggcagatccgtcctatctctacgatgtggatgatattattgcggcggaaggttcgatgaagggtaaacaaaagctgccacacactgaacaattccgttcattagataaggcagcaataagggatcaggaagcgggagttacctcgaatgtattcaacaagtggacactctcaacactaacagatgttgaggaagtgaaacaaatcgtgcgaatgttaccaatttgggcaacatgcatcctcttctggaccgtccacgctcaattaacgacattatcagtcgcacaatccgagacattggaccgttccatcgggagcttcgagatccctccagcatcgatggcagtcttctacgtcggtggcctcctcctaaccaccgccgtctatgaccgcgtcgccattcgtctatgcaaaaagctattcaactacccccatggtctaagaccgcttcaacggatcggtttggggcttttcttcggatcaatggctatggctgtggctgctttggtcgagctcaaacgtcttagaactgcacacgctcatggtccaacagtcaaaacgcttcctctagggttttatctactcatcccacaatatcttattgtcggtatcggcgaagcgttaatctacacaggacagttagatttcttcttgagagagtgccctaaaggtatgaaagggatgagcacgggtctattgttgagcacattggcattaggctttttcttcagctcggttctcgtgacaatcgtcgagaaattcaccgggaaagctcatccatggattgccgatgatctcaacaagggccgtctttacaatttctactggcttgtggccgtacttgttgccttgaacttcctcattttcctagttttctccaagtggtacgtttacaaggaaaaaagactagctgaggtggggattgagttggatgatgagccgagtattccaatgggtcattga

SEQ ID NO: 28 - protein, 590 aa, Arabidopsis thaliana
MSLPETKSDDILLDAWDFQGRPADRSKTGGWASAAMILCIEAVERLTTLGIGVNLVTYLTGTMHLGNATAANTVTNFLGTSFMLCLLGGFIADTFLGRYLTIAIFAAIQATGVSILTLSTIIPGLRPPRCNPTTSSHCEQASGIQLTVLYLALYLTALGTGGVKASVSGFGSDQFDETEPKERSKMTYFFNRFFFCINVGSLLAVTVLVYVQDDVGRKWGYGICAFAIVLALSVFLAGTNRYRFKKLIGSPMTQVAAVIVAAWRNRKLELPADPSYLYDVDDIIAAEGSMKGKQKLPHTEQFRSLDKAAIRDQEAGVTSNVFNKWTLSTLTDVEEVKQIVRMLPIWATCILFWTVHAQLTTLSVAQSETLDRSIGSFEIPPASMAVFYVGGLLLTTAVYDRVAIRLCKKLFNYPHGLRPLQRIGLGLFFGSMAMAVAALVELKRLRTAHAHGPTVKTLPLGFYLLIPQYLIVGIGEALIYTGQLDFFLRECPKGMKGMSTGLLLSTLALGFFFSSVLVTIVEKFTGKAHPWIADDLNKGRLYNFYWLVAVLVALNFLIFLVFSKWYVYKEKRLAEVGIELDDEPSIPMGH

SEQ ID NO: 29 - DNA, 2082 bp, Glycine max
  CDS (66)..(1826)
gtccccttgtttgtattgtagccttcaacccttaataatcccaccccacccctcaccctgcaccaatgagcaacctccctacaactcaagggaaagccatccctgatgcctccgactacaagggccgccccgccgagcgctctaaaaccggtggttggaccgcttccgccatgatattaggaggagaagtgatggagaggttgacaacactaggcatcgcggtgaatttggtaacatatttgactgggaccatgcatttgggtaatgctgcctctgccaacgttgtaaccaacttcttgggaacctccttcatgctctgtctgctcggtggcttcctcgccgatactttcctcggaagataccgcaccatcgccatcttcgctgccgttcaagcaactggtgtgacaatcttgacaatatcaaccataattccgagccttcaccctccaaagtgcaacggagacaccgtgccaccttgcgtgagagcaaatgagaaacaattaacggtgctttatttggcgctttatgtaacggcgctcggcaccggaggtttgaaatcgagtgtgtccgggttcggttcggatcagttcgatgattcggacgacgacgagaagaagcagatgataaagttcttcaactggttctacttcttcgtgagcatagggtctctggccgcaaccacggttcttgtgtacgtacaagacaacataggacgaggttggggttatggtatctgcgcgggtgcgatcgtggtggcacttctcgtgttcttgtcgggtacgaggaagtaccgtttcaagaaacttgtgggaagtccattaactcagtttgcggaagtgttcgtggctgctctgagaaagaggaacatggaattgccctctgattcatcattgctctttaatgactacgaccccaagaagcagactcttcctcatagcaagcagttccgtttcttggacaaagctgcaatcatggattcatcagaatgcggaggtggaatgaagaggaaatggtatctttgcaccctaacagacgtggaagaagtgaaaatgattctaagaatgctacccatatgggccaccaccatcatgttttggacaatccacgctcaaatgaccacattctcggtgtcacaagcgacaaccatggaccgtcacataggaaaaacatttcaaatgcccgcggcatcaatgaccgttttcttaattggaacaattctcctaactgtccccttctacgaccgtttcattgttcccgtggcaaagaaagtgctcaagaatccacatggtttcacccctttgcaacgcattggagtcggtttagtactctcagtggtttccatggtggtaggagcactgatagaaataaagagactaagatatgcccaatcacatggtttggtagataagccagaagcaaagatccctatgaccgtgttttggttgataccacagaacttgtttgtgggggcaggggaggcatttatgtacatggggcagttggactttttccttagagagtgtcccaaagggatgaaaacaatgagcacgggattgttcttgagcacactctctttggggtttttctttagcaccttgttagtgtctatagtgaacaaaatgacagcacatggtaggccatggctcgcagataatcttaaccaagggaggctctatgacttttactggctcttggctatattgagtgctataaatgtggtcttatacttggtttgtgctaagtggtacgtctacaaggagaagaggcttgctgaagagtgcattgaattggaagaagcagatgctgctgctttccatggccattgaatcttctcccgccaaccttttctcttgtttctctcttttttcttttcttttttttaaaatttttttcaaaatcccccctgcttgtatcaaaatgttaaacaagtatttccacacgaaaaaaagaaatgcctagcatctggttacccataattataaataagcttgtaagatgtaaccattttctatgtgtttatactgtgaaaaagaaaaagaggcaaataaattgaattgtttgccccataaaaaaaaaaaaaaa

SEQ ID NO: 30 - protein, 586 aa, Glycine max
MSNLPTTQGKAIPDASDYKGRPAERSKTGGWTASAMILGGEVMERLTTLGIAVNLVTYLTGTMHLGNAASANVVTNFLGTSFMLCLLGGFLADTFLGRYRTIAIFAAVQATGVTILTISTIIPSLHPPKCNGDTVPPCVRANEKQLTVLYLALYVTALGTGGLKSSVSGFGSDQFDDSDDDEKKQMIKFFNWFYFFVSIGSLAATTVLVYVQDNIGRGWGYGICAGAIVVALLVFLSGTRKYRFKKLVGSPLTQFAEVFVAALRKRNMELPSDSSLLFNDYDPKKQTLPHSKQFRFLDKAAIMDSSECGGGMKRKWYLCTLTDVEEVKMILRMLPIWATTIMFWTIHAQMTTFSVSQATTMDRHIGKTFQMPAASMTVFLIGTILLTVPFYDRFIVPVAKKVLKNPHGFTPLQRIGVGLVLSVVSMVVGALIEIKRLRYAQSHGLVDKPEAKIPMTVFWLIPQNLFVGAGEAFMYMGQLDFFLRECPKGMKTMSTGLFLSTLSLGFFFSTLLVSIVNKMTAHGRPWLADNLNQGRLYDFYWLLAILSAINVVLYLVCAKWYVYKEKRLAEECIELEEADAAAFHGH

SEQ ID NO: 31 - DNA, 2300 bp, Zea mays
  CDS (162)..(1958)
ttgggtacctcgaggccggccgggacagcaaacgttcctctcctcttccatcgtcgtcctcgctcccggccccgcctgtctagtcccctcttctcgcgtgcaccccctgtactgtacgtgctaggcacacagctagctgcagccacagcagggcacagcaaatggtttccggtgcgggtcatggtgggtacggcggcggcgacgacgggcaggccgtggacttccggggcaacccggcggacaagtcgaggaccggaggctggctgggcgccgggctgatcctgggcacggagctggcggagcgtgtgtgcgtgatgggcatctcgatgaacctggtgacgtacctcgtcggcgagctgcacctctccaactccaagtccgccaccgtggtgaccaacttcatgggcacgctcaacctgctcgccctcgtcggcggcttcctcgccgacgccaagctcggccgctacctcaccatcgccatctccgccacaatcgccgccacgggcgtgagcttgctgacggtggacacgacggtgccgagcatgcgtccaccggcgtgcctggacgcccgcgggccgcgcgcgcacgagtgcgtgccggcgcgcggcgggcagctggcgcttctgtacgcggcgctgtacacggtggcggcgggggccggcgggctcaaggcgaacgtgtccgggttcgggtcggaccagttcgacgggcgcgacccgcgggaggagcgcgccatggtgttcttcttcaaccgcttctacttctgcgtcagcctggggtcgctgttcgcggtcaccgtgctggtgtacgtgcaggacaacgtggggcggggctggggctacggcgtgtccgcagtcgccatggcgctcgccgtcgccgtgctcgtggccggcacgccccggtacaggtaccgccgcccgcagggcagcccgctgacggcggtcggccgggtgctcgccgcggcgtggaggaagcgccggctgccgctgcccgccgacgccgccgagctccacgggttcgccgcggccaaggtcgcccacactgacaggctcaggtggcttgacaaggccgcgatcgtggaggccgagctggcggggaagcagcgggcgagcgcggcggcagcgtcgacggtgacggaggtcgaggaggtgaagatggtggcgaagctgctgcccatctggttcacgtgcatcctcttctggacggtctactcccagatgaccaccttctcggtggagcaggccacgcgcatggaccgccacctccgcccgggctccggcgccggcgccggcggcttcgccgtcccggccggctccttctccgtcttcctattcctctccatcctgctcttcacctcgctcaacgagcgcctcctcgtgccgctggccgcccgcctcacgggccgcccgcaggggctcacctcgctgcagcgcgtcggggccgggctcgcgctctccgtcgccgccatggccgtctccgcgctcgtagagaggaagcggcgcgacgcggccaacgggccggaccacgtcgccgtcagcgccttctggctcgtcccgcagtacttcctcgtcggcgccggcgaggccttcgcctacgtgggccagctggagttcttcatccgcgaggcgcccgagcggatgaagtccatgagcaccggcctcttcctcgtcacgctctccatgggcttcttcctcagcagcttcctcgtcttcgccgtcgacgccgccaccgcgggcgcgtggatccggaacaacctcgaccgcggcaggctcgacctcttctactggatgctggccctgctcggcgtcgccaacttcgccgtcttcgtcgtcttcgccaggcggcaccagtacaaggccaccagcttgccggcgtcggtggcgcccgacggcaccgggcacaaggagatggacgacttcgtcgcagtcacggaggccgtggaaggagtggacgtgtagggcgcgcatgtcaggctcacacttcatcggtgggtggcctctgctgtttaattttgcctttgggtagtgtgtatgtgtatggcgaagttttctttctcttgccagtttccagtttgctgctacttcggcctgctctcctgtaaataacataggagacatgctaattgaggccaagtctttatccagttagatcaacaagatattgaattgggcatgaaggctgaacaccatgtgtgtgcattacagtacccaacccaaactctaacatagcatcgttataatggctgcgttgtaatgtggcgttaggccatgttcactctaatactacctcaatcccaaaat

SEQ ID NO: 32 - protein, 598 aa, Zea mays
MVSGAGHGGYGGGDDGQAVDFRGNPADKSRTGGWLGAGLILGTELAERVCVMGISMNLVTYLVGELHLSNSKSATVVTNFMGTLNLLALVGGFLADAKLGRYLTIAISATIAATGVSLLTVDTTVPSMRPPACLDARGPRAHECVPARGGQLALLYAALYTVAAGAGGLKANVSGFGSDQFDGRDPREERAMVFFFNRFYFCVSLGSLFAVTVLVYVQDNVGRGWGYGVSAVAMALAVAVLVAGTPRYRYRRPQGSPLTAVGRVLAAAWRKRRLPLPADAAELHGFAAAKVAHTDRLRWLDKAAIVEAELAGKQRASAAAASTVTEVEEVKMVAKLLPIWFTCILFWTVYSQMTTFSVEQATRMDRHLRPGSGAGAGGFAVPAGSFSVFLFLSILLFTSLNERLLVPLAARLTGRPQGLTSLQRVGAGLALSVAAMAVSALVERKRRDAANGPDHVAVSAFWLVPQYFLVGAGEAFAYVGQLEFFIREAPERMKSMSTGLFLVTLSMGFFLSSFLVFAVDAATAGAWIRNNLDRGRLDLFYWMLALLGVANFAVFVVFARRHQYKATSLPASVAPDGTGHKEMDDFVAVTEAVEGVDV

SEQ ID NO: 33 - DNA, 2720 bp, Zea mays
  CDS (491)..(2323)
  misc_feature (165)..(165): n is a, g, c or t
ttaattcggcacgaggcatcggtcgcgccccgatcgagccgacgaggccccatccccaacccctcatccatcgcttgctctctgccctctgggagctcgagcctcctcggttgaattgtgagtcgagctgctgagaaagacaagagcgcgcgatgagttctccgncctgccggccggaattcgacggcagtccgcaccgcacacacacgcacaggcagcagcacagcgatctgccttctgccccgcccccatccagcccagagcagcagcgcgcggtgccggccggcaaccgcagctggtcatcaggtctctgggcctcctcctcctcctccatcccccctcaaccctccccgtgtcggctcctcccgaatcctcacacgtagccccgcgcgccacctcgctgccggccgccggcacacagatagagagagagagagagactgagagagagagagggaggggaagcgaagagaccagaacaagagcgaagatggtcggactcctccccgagaccaatgccgcggcggagacggacgtcctcctcgacgcctgggacttcaagggccggccggccccgcgcgccaccaccggccgctggggcgccgccgccatgatcctagtggcggagctgaacgagcggctgacgacgctgggcatcgccgtgaacctggtgacgtacctgacgggcaccatgcacctgggcaacgccgagtccgccaacgtcgtcaccaacttcatgggcacctccttcatgctctgcctcctcggcggcttcgtcgccgactccttcctcggccgctacctcaccatcgccatcttcaccgccgtccaggcctcgggcgtgacgatcctgacgatctcgacggcggcgccggggctacggccggcgtcctgctccgcgaccggcgacggaggaggcgtcgtcggggagtgcgcgcgggcgtcgggggcgcagctgggggtgctgtacctggcgctgtacctgacggcgctgggcacgggtgggctaaagtcgagcgtgtcggggttcgggtcggaccagttcgacgagtcggacggcggggagaagcggcagatgatgcgcttcttcaactggttcttcttcttcatctcgctggggtcgctgctggccgtcaccgtgctggtgtacgtccaggacaacctgggcaggcgctggggctacggcgcctgcgcctgcgccatcgccgcgggcctcctcgtcttcctggccggcacacgcaggtaccgcttcaagaagctggccggcagccccctcacgcagatcgccgccgtcgtcgtcgccgcctggcgcaagcgccgcctccctctccccgccgaccccgccatgctctacgacgtcgacgtcggcaaggccgccgccgtcgaggatgggtcctccagcaagaagagcaagcgcaaggagcgcctcccccacaccgaccagttccgcttcctggaccacgcggcgatcaacgaggacccggcggcgggggcgagcagcagcagcaagtggcggctggcgacgctgacggacgtggaggaggtgaagacggtggcgcggatgctgccgatctgggcgaccacgatcatgttctggacggtgtacgcgcagatgaccaccttctcggtgtcgcaggccaccaccatggaccgccgcgtcgggggctcgttccagatccccgcgggctccctcaccgtcttcttcgtcggctccatcctgctcaccgtgcccgtctacgaccgcctcgtggtgcccgtcgcgcgccgcgtcagcggcaacccgcacggcctcaccccgctgcagcggatcgccgtcggcctcgcgctctccgtcgtcgccatggcgggcgccgcgctcacggaggtccgccgcctccgcgtcgcgcgcgagtcctccgagtccgcctccggaggcgtcgtgcccatgtccgtgttctggctcatcccgcagttcttcctcgtgggggcgggcgaggcgttcacgtacatcggccagctcgacttcttcctgcgcgagtgccccaaggggatgaagaccatgagcacggggctgttcctcagcaccctgtcgctgggattcttcgtcagctccgcgctcgtcgccgccgtgcacagggtcacgggcgaccgccacccctggatcgccaacgacctcaacaagggccgcctcgacaacttctactggctgctcgccgccgtctgcctcgccaacctactagtctacctcgtcgccgcccgctggtacaagtacaaggcgggccgccccggcgccgacggcagcgtcaacggcgtcgagatggccgacgagcccacgctccactgatccatccatgttcgatcgatcgacgaggcacgcgacggacgaccctaaattgaaccctatacaccgagcttaattatatatccgtccgatcgtcgtcggtcagattcattgctagctccgcgtgttgtaccatcgtgtcagtcagtgtatacgagtgtgtatcttttgtatccaagtacagcacgcgcgcgtgcgtaagcgtgtagttataaaaattaataacatgtttcttagaggagtgaggggggaattgtaaaaccgcttgtcaattgggctaagatcgttcgggacactgagcaaactcagaatgagttaagtttttcattttcatataaaaaaaaaaaaaaaaaagcggacttgacacctttaaatgatttagggtcgaataaagtctatc

SEQ ID NO: 34 - protein, 610 aa, Zea mays
MVGLLPETNAAAETDVLLDAWDFKGRPAPRATTGRWGAAAMILVAELNERLTTLGIAVNLVTYLTGTMHLGNAESANVVTNFMGTSFMLCLLGGFVADSFLGRYLTIAIFTAVQASGVTILTISTAAPGLRPASCSATGDGGGVVGECARASGAQLGVLYLALYLTALGTGGLKSSVSGFGSDQFDESDGGEKRQMMRFFNWFFFFISLGSLLAVTVLVYVQDNLGRRWGYGACACAIAAGLLVFLAGTRRYRFKKLAGSPLTQIAAVVVAAWRKRRLPLPADPAMLYDVDVGKAAAVEDGSSSKKSKRKERLPHTDQFRFLDHAAINEDPAAGASSSSKWRLATLTDVEEVKTVARMLPIWATTIMFWTVYAQMTTFSVSQATTMDRRVGGSFQIPAGSLTVFFVGSILLTVPVYDRLVVPVARRVSGNPHGLTPLQRIAVGLALSVVAMAGAALTEVRRLRVARESSESASGGVVPMSVFWLIPQFFLVGAGEAFTYIGQLDFFLRECPKGMKTMSTGLFLSTLSLGFFVSSALVAAVHRVTGDRHPWIANDLNKGRLDNFYWLLAAVCLANLLVYLVAARWYKYKAGRPGADGSVNGVEMADEPTLH

SEQ ID NO: 35 - DNA, 1773 bp, Arabidopsis thaliana
  CDS (1)..(1773)
atggttcatgtgtcatcatctcatggagccaaagatggctctgaagaagcctatgattacagaggaaacccaccagataagtctaaaaccggtggatggttaggcgccggtttaattttagggagcgagctatcagagagaatatgcgtgatgggcatatcaatgaatctagtgacgtaccttgttggagatttacacatctcatcagctaaatcagcgaccatagtcaccaacttcatgggaactcttaaccttctagggcttctcggtggttttttggctgacgctaaactcggtcgctacaagatggttgcaatctcagcttctgtcacagctctgggagtgttgcttttgacggtggctacaactatctcaagcatgagaccaccaatatgtgacgatttcaggagacttcatcatcagtgcatagaagcaaacggacaccagttggctcttctctatgttgctctctataccatagctctaggcggaggaggaatcaaatccaacgtctctggttttgggtctgaccagttcgatactagtgatcctaaagaagagaaacagatgattttcttcttcaacagattctatttctccatcagcgtcggctctctcttcgccgtgattgctcttgtttacgttcaggacaacgtcgggagaggctggggttacgggatctctgccgcgactatggtggttgcagccattgttttactctgcggaacgaaacggtaccgtttcaagaaacctaaaggaagcccttttacaacaatatggagggttggtttcttggcttggaagaaaagaaaggagagttaccctgcgcatccaagtcttttgaacggttatgacaacaccacggttccacacacagagatgcttaagtgtttagacaaagccgcaatttccaagaacgagagctctcctagctcgaaggacttcgaagagaaggatccgtggatcgtttcgactgttacacaagtcgaagaagtgaaactcgtgatgaaattggtaccgatttgggcaacgaacattcttttctggacgatttactcccaaatgacgactttcacggtcgaacaagcgacgtttatggaccgaaaactcggatctttcactgttcctgcaggctcttactctgctttcctcatactcacaattctcctcttcacttcccttaacgagagagtctttgttcctttaacaagaaggctcacaaaaaagcctcaaggaatcacaagcctacagagaatcggagtagggctagtattctcaatggctgcaatggctgtagccgcggttatagagaacgctagacgcgaggcagcggttaacaacgataagaaaataagcgcgttttggttggttccacaatatttcttagtcggtgcgggtgaggcctttgcttacgttggacagcttgagttctttataagagaagcaccagagaggatgaaatcgatgagcaccggattgtttctaagcacgatatcgatgggattcttcgtgagtagcttgcttgtttcgcttgttgatagggttacagacaaaagctggcttagaagtaaccttaacaaagcgagattgaactacttctactggttacttgttgtcttgggagcattgaacttcttgatttttattgtgtttgccatgaaacatcagtataaagctgatgtgattactgttgttgtgactgatgatgattcagtggagaaggaagtgacgaagaaagagagctctgaatttgagcttaaggacattccttga

SEQ ID NO: 36 - protein, 590 aa, Arabidopsis thaliana
MVHVSSSHGAKDGSEEAYDYRGNPPDKSKTGGWLGAGLILGSELSERICVMGISMNLVTYLVGDLHISSAKSATIVTNFMGTLNLLGLLGGFLADAKLGRYKMVAISASVTALGVLLLTVATTISSMRPPICDDFRRLHHQCIEANGHQLALLYVALYTIALGGGGIKSNVSGFGSDQFDTSDPKEEKQMIFFFNRFYFSISVGSLFAVIALVYVQDNVGRGWGYGISAATMVVAAIVLLCGTKRYRFKKPKGSPFTTIWRVGFLAWKKRKESYPAHPSLLNGYDNTTVPHTEMLKCLDKAAISKNESSPSSKDFEEKDPWIVSTVTQVEEVKLVMKLVPIWATNILFWTIYSQMTTFTVEQATFMDRKLGSFTVPAGSYSAFLILTILLFTSLNERVFVPLTRRLTKKPQGITSLQRIGVGLVFSMAAMAVAAVIENARREAAVNNDKKISAFWLVPQYFLVGAGEAFAYVGQLEFFIREAPERMKSMSTGLFLSTISMGFFVSSLLVSLVDRVTDKSWLRSNLNKARLNYFYWLLVVLGALNFLIFIVFAMKHQYKADVITVVVTDDDSVEKEVTKKESSEFELKDIP

SEQ ID NO: 37 - DNA, 1734 bp, Arabidopsis thaliana
  CDS (1)..(1734)
atggagagcaaagggagttggacagtggctgatgccgtagactacaaaggacgacctgccgacaaatccaaaaccggtggttggatcactgccgctctcattcttgggatagaagttgtggagaggctatcaacaatgggaatagcagtgaatttggtaacatatttgatggagacaatgcatctcccaagttcaacctctgccaacattgtcactgatttcatgggcacttccttcctcctatgcttgctcggtggttttctcgctgactccttcctcggccgtttcaaaaccatcggcattttctcaaccattcaagctctgggaactggtgctctagcggtagcaactaagctgccagagctacgtccaccaacatgccatcatggagaagcttgcatacccgcgaccgccttccaaatgacaattctttatgtttcgctttaccttatagcccttggaactggtggtcttaaatctagtatctctggatttgggtctgaccagtttgatgacaaagatcctaaagagaaagctcacatggctttcttcttcaacaggttcttcttctttattagtatggggacattattggctgtgactgttttagtttacatgcaagatgaagtgggaagatcttgggcttatggaatctgcactgtctctatggctatagctattgtaatattcttgtgtgggactaagagataccgttataagaagagccaaggaagtcccgttgtgcaaatatttcaggtcatagcagctgcgttccgaaagaggaaaatggaactacctcaaagcattgtttatctttatgaagataaccctgaaggcattagaattgaacatactgatcagtttcacttgttggacaaggcggccatagttgcagaaggagattttgaacaaacccttgatggagttgcaatcccaaacccttggaagctaagctcagtgaccaaagttgaggaagtaaaaatgatggttaggcttttgcctatttgggcaacaactataattttttggacaacatatgcccaaatgattacattctctgttgagcaagcttcaactatgagacgtaacattggaagctttaagatcccagctggttccctcaccgtgtttttcgttgcggctattctcataactctagctgtctacgaccgtgccataatgcctttttggaagaaatggaaaggaaaaccaggtttctctagcctacaaagaatagctattggattggtcttatcaaccgctggaatggcagctgcagctctagtagagcaaaagcgtttatccgttgcgaaatctagttcacaaaaaacattgcctataagtgtgtttttacttgttccacaattcttcttagtaggagctggggaagcctttatctacactggccaacttgatttcttcataacacaatcgcctaagggaatgaaaactatgagcactggactcttcttgaccactttatcactaggtttctttgtcagcagtttcttggtctcaatcgtcaagagggtcacttcaacttctactgatgtaggatggctggctgataacattaaccacggccgactcgattacttttattggcttttagtcattctcagtggaattaacttcgttgtctatatcatatgtgccttgtggtttaagccaacgaagggtaaagactcagtagagaaggaaaatggcaagggattttcagttgaagactgctga

SEQ ID NO: 38 - protein, 577 aa, Arabidopsis thaliana
MESKGSWTVADAVDYKGRPADKSKTGGWITAALILGIEVVERLSTMGIAVNLVTYLMETMHLPSSTSANIVTDFMGTSFLLCLLGGFLADSFLGRFKTIGIFSTIQALGTGALAVATKLPELRPPTCHHGEACIPATAFQMTILYVSLYLIALGTGGLKSSISGFGSDQFDDKDPKEKAHMAFFFNRFFFFISMGTLLAVTVLVYMQDEVGRSWAYGICTVSMAIAIVIFLCGTKRYRYKKSQGSPVVQIFQVIAAAFRKRKMELPQSIVYLYEDNPEGIRIEHTDQFHLLDKAAIVAEGDFEQTLDGVAIPNPWKLSSVTKVEEVKMMVRLLPIWATTIIFWTTYAQMITFSVEQASTMRRNIGSFKIPAGSLTVFFVAAILITLAVYDRAIMPFWKKWKGKPGFSSLQRIAIGLVLSTAGMAAAALVEQKRLSVAKSSSQKTLPISVFLLVPQFFLVGAGEAFIYTGQLDFFITQSPKGMKTMSTGLFLTTLSLGFFVSSFLVSIVKRVTSTSTDVGWLADNINHGRLDYFYWLLVILSGINFVVYIICALWFKPTKGKDSVEKENGKGFSVEDC

SEQ ID NO: 39 - DNA, 1701 bp, Oryza sativa (japonica cultivar-group)
  CDS (1)..(1701)
atggtgcgggacgcggtggactaccggggatgcccggcggacaggtcggcgacgggggggtgggtggcggcggcgctggtgctggggatcgagctgtgcgagcggctgtcgacgatggggatcgcggtgaacctggtgacgtacctgacgggcaccatgcacctccccagcgccgccgccgccaacgtcgtcaccgacttcatgggcacctccttcctcctctgcctcctcggcggcttcctcgccgactccttcctcggccgctacctcaccatcgccgtcttcgccctcgtccagtccatcggcaccgccctcctcgccgcctccaccctcgtcacccacctccgcccgccgcccggggagcagccgacgccggtgcagatggccgtgctctacgcctgcctctacctcatcgccctcggcaccggcggcctcaagtccagcgtctccggcttcggcaccgaccagttcgacgaccgcgacggccgggagcgcgccgccatgggcctcttcttcaaccgcttcttcttcttcatcagcctcggcacgctgctcgccgtcaccgtgctcgtctacgtccaggaccacgtcggccggagctgggcctacggcatctgctccgccgccatgctcgccgccatcgccgtcttcctctccgggaccaggaggtaccgctacaagcggagctccgggagccccatcgtccacatcctccaggtgctcgtcgccgcggcgcggaagcgcggggtcgtcaagcgcccgcccaccgcggcggagctctacgaggacgaccgccccgagcacgcccggatcgcgcacaccgcgcagttcccgtgcctggacatggcggcggtggtggccggcgaagaggacaacgaggtggccgggccgggcgggccggcggcgcccaacccgtggaagctctgctcggtgtcgcgcgtggaggaggtgaagatggtggcgaggctgatgccggtgtgggcgacgacgatcctcttctggaccatctacgcgcagatgatcaccttctccgtggagcaggccaccaccatggaccgccgcgtcggcgccggcttcgagatcccggccgcctcgctcaccgtcttcttcgtcggcgccatcatgctcaccctcgccgtctacgaccgcgtcttcatcccgctctgccgcgtactcaccggcaagcaaggcttcaccaacctggagaagatcggcatcggcctcgccctctccatcctcggcatggccgccgccgcgctctgcgagaagaagcgcctcgccgtcgccgtcgccgccaccaccgggaactccacgccgatcagcgtgttcctgctgacgccgcagttcctgctggtgggcgccggcgaggcgttcatctacacggggcagctggacttcttcatcacgaggtcgcccaaggggatgaagacgatgagcacggggctcttcctgacgacgctctcgctcggcttcttcttcagcagcgtgctcgtgtcgctcgtcaagggcgccaccacctggctcggcgacaccatcgaccgcagccgcctcgactacttctactggctcctcgccgtcctcagcgtcctcaacctcgccgcctacctcgtctgcgccaagtgggccgccaccgccgccgccacctcgcgggagcagcagcagcagcacaccgccgtcgccgacgccgacgagaaatgctag

SEQ ID NO: 40 - protein, 566 aa, Oryza sativa (japonica cultivar-group)
MVRDAVDYRGCPADRSATGGWVAAALVLGIELCERLSTMGIAVNLVTYLTGTMHLPSAAAANVVTDFMGTSFLLCLLGGFLADSFLGRYLTIAVFALVQSIGTALLAASTLVTHLRPPPGEQPTPVQMAVLYACLYLIALGTGGLKSSVSGFGTDQFDDRDGRERAAMGLFFNRFFFFISLGTLLAVTVLVYVQDHVGRSWAYGICSAAMLAAIAVFLSGTRRYRYKRSSGSPIVHILQVLVAAARKRGVVKRPPTAAELYEDDRPEHARIAHTAQFPCLDMAAVVAGEEDNEVAGPGGPAAPNPWKLCSVSRVEEVKMVARLMPVWATTILFWTIYAQMITFSVEQATTMDRRVGAGFEIPAASLTVFFVGAIMLTLAVYDRVFIPLCRVLTGKQGFTNLEKIGIGLALSILGMAAAALCEKKRLAVAVAATTGNSTPISVFLLTPQFLLVGAGEAFIYTGQLDFFITRSPKGMKTMSTGLFLTTLSLGFFFSSVLVSLVKGATTWLGDTIDRSRLDYFYWLLAVLSVLNLAAYLVCAKWAATAAATSREQQQQHTAVADADEKC

SEQ ID NO: 41 - DNA, 1785 bp, Oryza sativa (japonica cultivar-group)
  CDS (1)..(1785)
atggtgttgccggagacggcggcggaggggaaggcgctgacggacgcgtgggactacaaggggaggccggcggggagggcggccaccggcgggtggggctgcgcggcgatgatcctcggggcggagctgttcgagcggatgacgacgctgggcatcgccgtcaacctggtgccgtacatgaccgggacgatgcacctcggcaatgccgccgccgccaacacggtcaccaacttcatcggcacctccttcatgctctgcctcctcggcggcttcgtcgccgacacctacctcggccgctacctcaccatcgccatcttcgaggccgtccaggccaccggcgtgatgatactcacgatctccacggcggcgccggggctgcggccgccggcgtgcggcgacccgaagggggcgagcgcggagtgcgtggcggcggacgggacgcagctcggggtgctctacctggggctctacctgacggcgctgggcacgggggggctcaagtccagcgtctccggcttcggctccgaccagttcgacgagtccgacgtcgacggcgagaggaagaagatgatgcgcttcttcaactggttctacttcttcgtcagcctcggcgcgctgctcgccgtcaccgtgctggtgtacgtgcaggacaacgtcggacgccggtgggggtacggcatctgcgccgccggcatcctcgccggcctcgccgtgttcctctccgggaccaggaggtacaggttcaagaagctggtggggagccccctcacccaggtcgccgccgtcaccgccgccgcctggagcaagaggtcgctgccgctgccgtccgacccagacatgctctacgacgtcgacgacgccgccgccgccggccatgacgtcaagggcaagcagaggatgccacacagcaaggagtgccggttcctggaccatgcggcgatcatcgacaggtcggcggcggagtcgccggcgacggcgagcaagtggaggctgtgcacgaggacggacgtggaggaggtgaagcaggtggtgcggatgctccccatctgggcgaccaccatcatgttctggaccatccacgcccagatgaccaccttcgccgtcgcgcaggccgagctcatggaccgccgcctcgccggcggcttcctcatcccggcgggctccctcaccgtcttcctcatcgcctccatcctcctcaccgtccccttctacgaccgcctcgtcgtccccgtcgcgcgccgcgccacggccaacccgcacggcctcaccccgctccagcgcgtcttcgtgggcctctccctctccatcgccggcatggccgtcgccgcggccgtcgagcgccaccgcgccaccgcctccgcctccgccgccgccgccgcgcccacggtgttcctcctcatgccgcagttcctcctcgtcggcgccggcgaggcgttcacctacatgggccagctcgacttcttcctccgcgagtgccccaaggggatgaagaccatgagcacgggcctcttcctcagcacctgcgccatcggcttcttcttcagcacgctgctcgtcaccatcgtccacaaggtcaccggccatggcgcccgcggcggcggctggctcgccgacaacctcgacgacggcaggctcgactacttctactggctgctcgccgtcatcagcgccatcaacctcgtcctcttcaccgtcgccgccagggggtacgtctacaaggagaagcgcctcgccgacgccggcatcgagctcgccgacgaggagaccatcgccgtcggccactaa

SEQ ID NO: 42 - protein, 594 aa, Oryza sativa (japonica cultivar-group)
MVLPETAAEGKALTDAWDYKGRPAGRAATGGWGCAAMILGAELFERMTTLGIAVNLVPYMTGTMHLGNAAAANTVTNFIGTSFMLCLLGGFVADTYLGRYLTIAIFEAVQATGVMILTISTAAPGLRPPACGDPKGASAECVAADGTQLGVLYLGLYLTALGTGGLKSSVSGFGSDQFDESDVDGERKKMMRFFNWFYFFVSLGALLAVTVLVYVQDNVGRRWGYGICAAGILAGLAVFLSGTRRYRFKKLVGSPLTQVAAVTAAAWSKRSLPLPSDPDMLYDVDDAAAAGHDVKGKQRMPHSKECRFLDHAAIIDRSAAESPATASKWRLCTRTDVEEVKQVVRMLPIWATTIMFWTIHAQMTTFAVAQAELMDRRLAGGFLIPAGSLTVFLIASILLTVPFYDRLVVPVARRATANPHGLTPLQRVFVGLSLSIAGMAVAAAVERHRATASASAAAAAPTVFLLMPQFLLVGAGEAFTYMGQLDFFLRECPKGMKTMSTGLFLSTCAIGFFFSTLLVTIVHKVTGHGARGGGWLADNLDDGRLDYFYWLLAVISAINLVLFTVAARGYVYKEKRLADAGIELADEETIAVGH

SEQ ID NO: 43 - DNA, 1779 bp, Oryza sativa (japonica cultivar-group)
  CDS (1)..(1779)
atggtttctgccggcgttcatggcggcgacgacggcgtggtggtggatttcaggggaaacccggtggacaaggaccggaccggaggatggctcggagccggtctcatcctagggacggaattggcggagcgcgtgtgcgtggtgggcatctcgatgaacctggtgacgtacctcgtcggcgacctgcacctctccaacgccaggtcggccaacatcgtcaccaacttcctgggcacgctcaacctcctcgccctcctcggcggcttcctcgccgacgccgtgctcggccgctacctcaccgtcgccgtctccgccaccatcgccgccatcggtgtgagcctgctggcagcgagcacggtagtgccgggaatgcggccgccgccgtgcggcgacgcggtggcggcggcggcggcggcggagagtggtgggtgcgtggcggcgagcggcgggcagatggcgatgctgtacgcggcgctgtacacggcggcggcgggggcgggggggctgaaggcgaacgtgtccgggttcgggtcggaccagttcgacgggcgcgaccgccgggaggggaaggccatgctcttcttcttcaaccgcttctacttctgcatcagcctcggctcggtgctcgcggtcaccgcgctggtgtacgtgcaggaggacgtcggccgcggctggggctacggcgcgtcggccgccgccatggtcgccgcggtggcggtgttcgccgccggcacgccgaggtaccggtaccggaggccccaggggagccccctcacggcgatcggccgcgtgctgtgggcggcgtggcgcaaacggaggatgccgttcccggcggacgccggcgagctccacggcttccacaaggctaaggtgccacacactaacaggctcaggtgtctggacaaagccgcaatcgtggaggccgacctggcggcggcgacgccaccggagcagccagtggcggcgctgacggtgacggaggtggaggaggcgaagatggtggtgaagctgctccccatctggtccacgagcatcctcttctggacggtctactcccagatgaccaccttctccgtcgagcaggcgtcgcacatggaccgccgcgccggcggcttcgccgtgccggcgggctccttctccgtcttcctcttcctgtccatcctcctcttcacctccgccagcgagcggctcctcgtcccgctcgcgcgccgcctgatgatcacacgccgcccgcaggggctgacctccctgcagcgcgtcggcgcggggctcgtcctcgccacgctcgccatggccgtctcggcgctcgtcgagaagaagcgccgcgacgcgtccggcggagccggcggaggaggcgtcgcgatgatcagcgcgttctggctggtgccgcagttcttcctggtgggcgccggcgaggcgttcgcgtacgtggggcagctggagttcttcatcagggaggcccccgagcggatgaagtccatgagcacgggcctgttcctcgccacgctcgccatggggttcttcctgagcagcctcctcgtgtccgccgtcgacgccgccacgcggggcgcgtggatccgggacggcctggacgacgggaggctggacctgttctactggatgctcgccgcgctcggggtggccaacttcgcggcgttcctggtgttcgcgagccggcaccagtacaggccggcgatactgcccgcggcggactcgccgccggacgacgagggcgcggtcagggaggccgcgacgacagtgaaagggatggacttctag

SEQ ID NO: 44 - protein, 592 aa, Oryza sativa (japonica cultivar-group)
MVSAGVHGGDDGVVVDFRGNPVDKDRTGGWLGAGLILGTELAERVCVVGISMNLVTYLVGDLHLSNARSANIVTNFLGTLNLLALLGGFLADAVLGRYLTVAVSATIAAIGVSLLAASTVVPGMRPPPCGDAVAAAAAAESGGCVAASGGQMAMLYAALYTAAAGAGGLKANVSGFGSDQFDGRDRREGKAMLFFFNRFYFCISLGSVLAVTALVYVQEDVGRGWGYGASAAAMVAAVAVFAAGTPRYRYRRPQGSPLTAIGRVLWAAWRKRRMPFPADAGELHGFHKAKVPHTNRLRCLDKAAIVEADLAAATPPEQPVAALTVTEVEEAKMVVKLLPIWSTSILFWTVYSQMTTFSVEQASHMDRRAGGFAVPAGSFSVFLFLSILLFTSASERLLVPLARRLMITRRPQGLTSLQRVGAGLVLATLAMAVSALVEKKRRDASGGAGGGGVAMISAFWLVPQFFLVGAGEAFAYVGQLEFFIREAPERMKSMSTGLFLATLAMGFFLSSLLVSAVDAATRGAWIRDGLDDGRLDLFYWMLAALGVANFAAFLVFASRHQYRPAILPAADSPPDDEGAVREAATTVKGMDF

SEQ ID NO: 45 - DNA, 1812 bp, Oryza sativa (japonica cultivar-group)
  CDS (1)..(1812)
atggtggggatgttgccggagacgaatgcgcaggcggcggcggaggaggtgctgggcgacgcgtgggactaccgggggcggccggcggcgaggtcgcggacggggaggtggggcgcggcggcgatgatactggtggcggagctgaacgagcggctgacgacgctggggatcgccgtgaacctggtcacctacctgacggcgacgatgcacgccggcaacgccgaggccgccaacgtcgtcaccaacttcatgggcacctccttcatgctctgcctcctcggcggcttcgtcgccgactccttcctcggccgctacctcaccatcgccatcttcaccgccgtccaagcctcgggggtgacgatcctgacgatctcgacggcggcgccggggctgaggccggcggcgtgcgcggcggggtcggcggcgtgcgagcgcgcgacgggggcgcagatgggggtgctgtacctggcgctctacctgacggcgctgggcaccggcgggctcaagtcgagcgtctccggcttcggctccgaccagttcgacgagtcggactccggcgagaagtcgcagatgatgcggttcttcaactggttcttcttcttcatcagcctcggctcgctgctcgccgtcaccgtgctcgtctacgtccaggacaacctcggccggccgtgggggtacggcgcgtgcgccgccgccatcgcggcggggctcgtcgtgttcctcgccgggacgcggaggtacaggttcaagaagctggtggggagccccctgacgcagatcgccgccgtcgtcgtcgccgcgtggcggaagcgccgcctcgagctcccctccgaccccgccatgctctacgacatcgacgtcggcaagctcgccgccgccgaggtcgagctggccgcctcctccaagaagagcaagctcaagcagcgactcccccacaccaagcaattcaggttcttggaccatgcggcgatcaacgacgcgccggacggcgagcagagcaagtggacgctggcgacgctgacggacgtggaggaggtgaagacggtggcgaggatgctgccgatctgggcgacgacgatcatgttctggacggtgtacgcccagatgaccaccttctccgtgtcccaggcgaccaccatggaccgccacatcggcgcctccttccagatcccggcgggctccctcaccgtcttcttcgtcggctccatcctcctcaccgtgcccatctacgaccgcctcgtcgtgcccgtggcgcggcgcgccaccggcaacccgcacgggctcaccccgctccagcgcatcggcgtcgggctggtgctgtccatcgtcgccatggtgtgcgccgcgctgacggaggtgaggcggctccgcgtggcgagggacgcgcgcgtcggcggcggcgaggccgtgcccatgaccgtgttctggctgatcccgcagttcctgttcgtcggcgccggcgaggcgttcacctacatcggccagctcgacttcttcctccgcgagtgccccaaggggatgaagacgatgagcacggggctgttcctgagcacgctctcgctggggttcttcgtcagctcggcgctcgtcgccgccgtccacaagctcaccggcgaccgccacccctggctcgccgacgacctcaacaagggccagctccacaagttctactggctcctcgccggcgtctgcctcgccaacctcctcgtatacctcgtcgccgccaggtggtacaagtacaaggccggccgcgccgccgccgccggcgacggcggcgtcgagatggccgacgccgagccatgcctccactga

SEQ ID NO: 46 - protein, 603 aa, Oryza sativa (japonica cultivar-group)
MVGMLPETNAQAAAEEVLGDAWDYRGRPAARSRTGRWGAAAMILVAELNERLTTLGIAVNLVTYLTATMHAGNAEAANVVTNFMGTSFMLCLLGGFVADSFLGRYLTIAIFTAVQASGVTILTISTAAPGLRPAACAAGSAACERATGAQMGVLYLALYLTALGTGGLKSSVSGFGSDQFDESDSGEKSQMMRFFNWFFFFISLGSLLAVTVLVYVQDNLGRPWGYGACAAAIAAGLVVFLAGTRRYRFKKLVGSPLTQIAAVVVAAWRKRRLELPSDPAMLYDIDVGKLAAAEVELAASSKKSKLKQRLPHTKQFRFLDHAAINDAPDGEQSKWTLATLTDVEEVKTVARMLPIWATTIMFWTVYAQMTTFSVSQATTMDRHIGASFQIPAGSLTVFFVGSILLTVPIYDRLVVPVARRATGNPHGLTPLQRIGVGLVLSIVAMVCAALTEVRRLRVARDARVGGGEAVPMTVFWLIPQFLFVGAGEAFTYIGQLDFFLRECPKGMKTMSTGLFLSTLSLGFFVSSALVAAVHKLTGDRHPWLADDLNKGQLHKFYWLLAGVCLANLLVYLVAARWYKYKAGRAAAAGDGGVEMADAEPCLH

SEQ ID NO: 47 - DNA, 1761 bp, Arabidopsis thaliana
  CDS (1)..(1761)
atggttcgtttttcaatagttagtggagaagagagcaaagggagttggacagtggctgatgccgtagactacaaaggacgacctgccgacaaatccaaaaccggtggttggatcactgccgctctcattcttgggatagaagttgtggagaggctatcaacaatgggaatagcagtgaatttggtaacatatttgatggagacaatgcatctcccaagttcaacctctgccaacattgtcactgatttcatgggcacttccttcctcctatgcttgctcggtggttttctcgctgactccttcctcggccgtttcaaaaccatcggcattttctcaaccattcaagctctgggaactggtgctctagcggtagcaactaagctgccagagctacgtccaccaacatgccatcatggagaagcttgcatacccgcgaccgccttccaaatgacaattctttatgtttcgctttaccttatagcccttggaactggtggtcttaaatctagtatctctggatttgggtctgaccagtttgatgacaaagatcctaaagagaaagctcacatggctttcttcttcaacaggttcttcttctttattagtatggggacattattggctgtgactgttttagtttacatgcaagatgaagtgggaagatcttgggcttatggaatctgcactgtctctatggctatagctattgtaatattcttgtgtgggactaagagataccgttataagaagagccaaggaagtcccgttgtgcaaatatttcaggtcatagcagctgcgttccgaaagaggaaaatggaactacctcaaagcattgtttatctttatgaagataaccctgaaggcattagaattgaacatactgatcagtttcacttgttggacaaggcggccatagttgcagaaggagattttgaacaaacccttgatggagttgcaatcccaaacccttggaagctaagctcagtgaccaaagttgaggaagtaaaaatgatggttaggcttttgcctatttgggcaacaactataattttttggacaacatatgcccaaatgattacattctctgttgagcaagcttcaactatgagacgtaacattggaagctttaagatcccagctggttccctcaccgtgtttttcgttgcggctattctcataactctagctgtctacgaccgtgccataatgcctttttggaagaaatggaaaggaaaaccaggtttctctagcctacaaagaatagctattggattggtcttatcaaccgctggaatggcagctgcagctctagtagagcaaaagcgtttatccgttgcgaaatctagttcacaaaaaacattgcctataagtgtgtttttacttgttccacaattcttcttagtaggagctggggaagcctttatctacactggccaacttgatttcttcataacacaatcgcctaagggaatgaaaactatgagcactggactcttcttgaccactttatcactaggtttctttgtcagcagtttcttggtctcaatcgtcaagagggtcacttcaacttctactgatgtaggatggctggctgataacattaaccacggccgactcgattacttttattggcttttagtcattctcagtggaattaacttcgttgtctatatcatatgtgccttgtggtttaagccaacgaagggtaaagactcagtagagaaggaaaatggcaagggattttcagttgaagactgctga

SEQ ID NO: 48 - protein, 586 aa, Arabidopsis thaliana
MVRFSIVSGEESKGSWTVADAVDYKGRPADKSKTGGWITAALILGIEVVERLSTMGIAVNLVTYLMETMHLPSSTSANIVTDFMGTSFLLCLLGGFLADSFLGRFKTIGIFSTIQALGTGALAVATKLPELRPPTCHHGEACIPATAFQMTILYVSLYLIALGTGGLKSSISGFGSDQFDDKDPKEKAHMAFFFNRFFFFISMGTLLAVTVLVYMQDEVGRSWAYGICTVSMAIAIVIFLCGTKRYRYKKSQGSPVVQIFQVIAAAFRKRKMELPQSIVYLYEDNPEGIRIEHTDQFHLLDKAAIVAEGDFEQTLDGVAIPNPWKLSSVTKVEEVKMMVRLLPIWATTIIFWTTYAQMITFSVEQASTMRRNIGSFKIPAGSLTVFFVAAILITLAVYDRAIMPFWKKWKGKPGFSSLQRIAIGLVLSTAGMAAAALVEQKRLSVAKSSSQKTLPISVFLLVPQFFLVGAGEAFIYTGQLDFFITQSPKGMKTMSTGLFLTTLSLGFFVSSFLVSIVKRVTSTSTDVGWLADNINHGRLDYFYWLLVILSGINFVVYIICALWFKPTKGKDSVEKENGKGFSVEDC

SEQ ID NO: 49 - DNA, 2149 bp, Oryza sativa
  CDS (94)..(1884)
gatcacagcatccatcgccgccggccaccaccaccaccaccgccgccgccgtcttactctctctgtctcgagctcgagcttgttgttgttgatatggcgatggtgttgccggagacggcggcggaggggaaggcgctgacggacgcgtgggactacaaggggaggccggcggggagggcggccaccggcgggtggggctgcgcggcgatgatcctcggggcggagctgttcgagcggatgacgacgctgggcatcgccgtcaacctggtgccgtacatgaccgggacgatgcacctcggcaatgccgccgccgccaacacggtcaccaacttcatcggcacctccttcatgctctgcctcctcggcggcttcgtcgccgacacctacctcggccgctacctcaccatcgccatcttcgaggccgtccaggccaccggcgtgatgatactcacgatctccacggcggcgccggggctgcggccgccggcgtgcggcgacccgaagggggcgagcgcggagtgcgtggcggcggacgggacgcagctcggggtgctctacctggggctctacctgacggcgctgggcacgggggggctcaagtccagcgtctccggcttcggctccgaccagttcgacgagtccgacgtcgacggcgagaggaagaagatgatgcgcttcttcaactggttctacttcttcgtcagcctcggcgcgctgctcgccgtcaccgtgctggtgtacgtgcaggacaacgtcggacgccggtgggggtacggcatctgcgccgccggcatcctcgccggcctcgccgtgttcctctccgggaccaggaggtacaggttcaagaagctggtggggagccccctcacccaggtcgccgccgtcaccgccgccgcctggagcaagaggtcgctgccgctgccgtccgacccagacatgctctacgacgtcgacgacgccgccgccgccggccatgacgtcaagggcaagcagaggatgccacacagcaaggagtgccggttcctggaccatgcggcgatcatcgacaggtcggcggcggagtcgccggcgacggcgagcaagtggaggctgtgcacgaggacggacgtggaggaggtgaagcaggtggtgcggatgctccccatctgggcgaccaccatcatgttctggaccatccacgcccagatgaccaccttcgccgtcgcgcaggccgagctcatggaccgccgcctcgccggcggcttcctcatcccggcgggctccctcaccgtcttcctcatcgcctccatcctcctcaccgtccccttctacgaccgcctcgtcgtccccgtcgcgcgccgcgccacggccaacccgcacggcctcaccccgctccagcgcgtcttcgtgggcctctccctctccatcgccggcatggccgtcgccgcggccgtcgagcgccaccgcgccaccgcctccgcctccgccgccgccgccgcgcccacggtgttcctcctcatgccgcagttcctcctcgtcggcgccggcgaggcgttcacctacatgggccagctcgacttcttcctccgcgagtgccccaaggggatgaagaccatgagcacgggcctcttcctcagcacctgcgccatcggcttcttcttcagcacgctgctcgtcaccatcgtccacaaggtcaccggccatggcgcccgcggcggcggctggctcgccgacaacctcgacgacggcaggctcgactacttctactggctgctcgccgtcatcagcgccatcaacctcgtcctcttcaccgtcgccgccagggggtacgtctacaaggagaagcgcctcgccgacgccggcatcgagctcgccgacgaggagaccatcgccgtcggccactaatagtgaccgatcgatgcgtcagcatgacatacgcaagctagctaccagttagctgcacgcgtcgtgtatgtacgtcgtccttgtaataactttggttttttcttttcttgtattttgaatttttcttcttcttcttcttcttcttcttcttcttcttcttcttcgtgtattgtattcgacgtatttcgccgggtataatttgggtgtattctcatcgcacgtataattaattaattaaccaactacgtaataactacgtggagtt

SEQ ID NO: 50 - protein, 596 aa, Oryza sativa
MAMVLPETAAEGKALTDAWDYKGRPAGRAATGGWGCAAMILGAELFERMTTLGIAVNLVPYMTGTMHLGNAAAANTVTNFIGTSFMLCLLGGFVADTYLGRYLTIAIFEAVQATGVMILTISTAAPGLRPPACGDPKGASAECVAADGTQLGVLYLGLYLTALGTGGLKSSVSGFGSDQFDESDVDGERKKMMRFFNWFYFFVSLGALLAVTVLVYVQDNVGRRWGYGICAAGILAGLAVFLSGTRRYRFKKLVGSPLTQVAAVTAAAWSKRSLPLPSDPDMLYDVDDAAAAGHDVKGKQRMPHSKECRFLDHAAIIDRSAAESPATASKWRLCTRTDVEEVKQVVRMLPIWATTIMFWTIHAQMTTFAVAQAELMDRRLAGGFLIPAGSLTVFLIASILLTVPFYDRLVVPVARRATANPHGLTPLQRVFVGLSLSIAGMAVAAAVERHRATASASAAAAAPTVFLLMPQFLLVGAGEAFTYMGQLDFFLRECPKGMKTMSTGLFLSTCAIGFFFSTLLVTIVHKVTGHGARGGGWLADNLDDGRLDYFYWLLAVISAINLVLFTVAARGYVYKEKRLADAGIELADEETIAVGH

SEQ ID NO: 51 - DNA, 1770 bp, Brassica napus
  CDS (1)..(1770)
atgtctctacctgaaactaaaacacaaacccttctcgatgcttgggacttccaaggccgcccagccgatcgttctaagaccggtggatgggccagcgccgccatgattctctgtattgaggcggtggagcggttgacgacgttaggtatcggcgttaacctagtgacgtatttgacgggaactatgcatttaggcaatgcaacggcggctaacaccgtcacaaacttcctcggaacttcgttcatgctctgtctcctcggtggcttcatagcggacacttttcttggaaggtacctaaccattgctatattcgccgctatccaagccacaggtgtttcgatcttaaccctctcaactatcataccgggactgagaccaccaagatgcgatccaacgacctcgtctcattgcgtacaagcgaatggaatacaacttacggtcctatacttagccttataccttacggccctaggaactggaggagtgaaggcaagcgtctccggttttgggtcagaccaattcgatgacactgaaccgaaagaacggtcacaaatgacatatttcttcaaccgtttcttcttttgtatcaacgtcggttctcttatggccgtgacggtccttgtctacatacaagatgatgttggacgtaaatggggctatggcatttgcgcgttggcaatcgtgctttcactaagcattttcttggccggcactaatcgctaccggttcaagaagttgattggtagcccgatgacgcaagttggcacggttcttgtggcggcgtggaggaataggcggctcgagttgccatcggacccgtcgtttctatatgacttggacgatgttattgcggctgaaggttcgatgaagagtaaacaaaagttgccgcataccaatcagttccggtcattggacaaagcagcgataaaggaccaagaaatggcaatgacccaaaacgtatacaacaaatggacactatcaacagtaactgatattgaggaagtgaaacaaattgtacggatgttaccaatttgggcaacatgcatcctcttttggactgtccatgctcaactaacgacattatcggtcgcgcagtccgagaccatggaccgtcacattgggagctttgagatccctccagccgcaatggccgtattctatatcggtggcctcctcctaaccaccgccgtctacgaccgtctcgcgattcccttatgcaaaaagctattcaactacccccacggtctgagacctcttcaacgcattggtttgggtctcttacttgcagccatgggtatggccgtagctgctttggtcgagatcaaacgtcttagaacagcacatgcccacggtccaacagtcaaaacccttcctctagggttttctctactcatcccacaataccttattgtgggtatcggcgaggcgttgatctacacaggacagctagattttttcttgagagagtgtcctaaaggtatgaaaacaatgagcacgggtttattgttgagcacattggctttagggtttttcttcagctcggttctcgtaaccatcgttgagaaagtcactgataaagctcatccgtggatagctgatgatctcaacaagggccgtctatacaatttctattggcttgtggcagtaattgttgctttgaacttcctcgttttccttgttttctccaagtggtacgtctacaaggagaagagactagctgaccttgggattgagttggaagacgagccagacattcccatgggtcattga

SEQ ID NO: 52 - protein, 589 aa, Brassica napus
MSLPETKTQTLLDAWDFQGRPADRSKTGGWASAAMILCIEAVERLTTLGIGVNLVTYLTGTMHLGNATAANTVTNFLGTSFMLCLLGGFIADTFLGRYLTIAIFAAIQATGVSILTLSTIIPGLRPPRCDPTTSSHCVQANGIQLTVLYLALYLTALGTGGVKASVSGFGSDQFDDTEPKERSQMTYFFNRFFFCINVGSLMAVTVLVYIQDDVGRKWGYGICALAIVLSLSIFLAGTNRYRFKKLIGSPMTQVGTVLVAAWRNRRLELPSDPSFLYDLDDVIAAEGSMKSKQKLPHTNQFRSLDKAAIKDQEMAMTQNVYNKWTLSTVTDIEEVKQIVRMLPIWATCILFWTVHAQLTTLSVAQSETMDRHIGSFEIPPAAMAVFYIGGLLLTTAVYDRLAIPLCKKLFNYPHGLRPLQRIGLGLLLAAMGMAVAALVEIKRLRTAHAHGPTVKTLPLGFSLLIPQYLIVGIGEALIYTGQLDFFLRECPKGMKTMSTGLLLSTLALGFFFSSVLVTIVEKVTDKAHPWIADDLNKGRLYNFYWLVAVIVALNFLVFLVFSKWYVYKEKRLADLGIELEDEPDIPMGH

SEQ ID NO: 53 - DNA, 1764 bp, Oryza sativa
  CDS (1)..(1764)
atggttcgtgaggtggagaagaagacgtcggcgtggagcggcggcggcggcggcggggggaacatggtgcgggacgcggtggactaccggggatgcccggcggacaggtcggcgacgggggggtgggtggcggcggcgctggtgctggggatcgagctgtgcgagcggctgtcgacgatggggatcgcggtgaacctggtgacgtacctgacgggcaccatgcacctccccagcgccgccgccgccaacgtcgtcaccgacttcatgggcacctccttcctcctctgcctcctcggcggcttcctcgccgactccttcctcggccgctacctcaccatcgccgtcttcgccctcgtccagtccatcggcaccgccctcctcgccgcctccaccctcgtcacccacctccgcccgccgcccggggagcagccgacgccggtgcagatggccgtgctctacgcctgcctctacctcatcgccctcggcaccggcggcctcaagtccagcgtctccggcttcggcaccgaccagttcgacgaccgcgacggccgggagcgcgccgccatgggcctcttcttcaaccgcttcttcttcttcatcagcctcggcacgctgctcgccgtcaccgtgctcgtctacgtccaggaccacgtcggccggagctgggcctacggcatctgctccgccgccatgctcgccgccatcgccgtcttcctctccgggaccaggaggtaccgctacaagcggagctccgggagccccatcgtccacatcctccaggtgctcgtcgccgcggcgcggaagcgcggggtcgtcaagcgcccgcccaccgcggcggagctctacgaggacgaccgccccgagcacgcccggatcgcgcacaccgcgcagttcccgtgcctggacatggcggcggtggtggccggcgaagaggacaacgaggtggccgggccgggcgggccggcggcgcccaacccgtggaagctctgctcggtgtcgcgcgtggaggaggtgaagatggtggcgaggctgatgccggtgtgggcgacgacgatcctcttctggaccatctacgcgcagatgatcaccttctccgtggagcaggccaccaccatggaccgccgcgtcggcgccggcttcgagatcccggccgcctcgctcaccgtcttcttcgtcggcgccatcatgctcaccctcgccgtctacgaccgcgtcttcatcccgctctgccgcgtactcaccggcaagcaaggcttcaccaacctggagaagatcggcatcggcctcgccctctccatcctcggcatggccgccgccgcgctctgcgagaagaagcgcctcgccgtcgccgtcgccgccaccaccgggaactccacgccgatcagcgtgttcctgctgacgccgcagttcctgctggtgggcgccggcgaggcgttcatctacacggggcagctggacttcttcatcacgaggtcgcccaaggggatgaagacgatgagcacggggctcttcctgacgacgctctcgctcggcttcttcttcagcagcgtgctcgtgtcgctcgtcaagggcgccaccacctggctcggcgacaccatcgaccgcagccgcctcgactacttctactggctcctcgccgtcctcagcgtcctcaacctcgccgcctacctcgtctgcgccaagtgggccgccaccgccgccgccacctcgcgggagcagcagcagcagcacaccgccgtcgccgacgccgacgagaaatgctag

SEQ ID NO: 54 - protein, 587 aa, Oryza sativa
MVREVEKKTSAWSGGGGGGGNMVRDAVDYRGCPADRSATGGWVAAALVLGIELCERLSTMGIAVNLVTYLTGTMHLPSAAAANVVTDFMGTSFLLCLLGGFLADSFLGRYLTIAVFALVQSIGTALLAASTLVTHLRPPPGEQPTPVQMAVLYACLYLIALGTGGLKSSVSGFGTDQFDDRDGRERAAMGLFFNRFFFFISLGTLLAVTVLVYVQDHVGRSWAYGICSAAMLAAIAVFLSGTRRYRYKRSSGSPIVHILQVLVAAARKRGVVKRPPTAAELYEDDRPEHARIAHTAQFPCLDMAAVVAGEEDNEVAGPGGPAAPNPWKLCSVSRVEEVKMVARLMPVWATTILFWTIYAQMITFSVEQATTMDRRVGAGFEIPAASLTVFFVGAIMLTLAVYDRVFIPLCRVLTGKQGFTNLEKIGIGLALSILGMAAAALCEKKRLAVAVAATTGNSTPISVFLLTPQFLLVGAGEAFIYTGQLDFFITRSPKGMKTMSTGLFLTTLSLGFFFSSVLVSLVKGATTWLGDTIDRSRLDYFYWLLAVLSVLNLAAYLVCAKWAATAAATSREQQQQHTAVADADEKC

SEQ ID NO: 55 - DNA, 1830 bp, Oryza sativa
  CDS (1)..(1830)
atggttgctgccggaggaggtcatggtggtggcgccgacgacggcatggttgtcgactaccggggtaacccggtggacaagtccaagaccgggggatggctcggcgccgggcttatcctagggacggagctggcggagcgggtgtgcgtgatgggcatctcgatgaacctggtgacgtacctcgtcggcgacctgcacctctccaacgccaagtccgccaacatcgtcaccaacttcatgggcaccctcaacctcctcgccctcgtcggcggcttcctcgccgacgccaagctcggccgctacctcaccatcgccatctccgccaccatcgccgccaccggggtgagcttgctgacggtggacacgatggtgccggggatgcggccgccgccgtgcgcggacgcgcgcggcgccggggcgcacctgcggtgcgagccggcgcgcggggggcagctggcgatgctgtacgcggcgctgtacacggtcgcggcgggcgcgggggggctcaaggcgaacgtgtccgggttcggctccgaccagttcgacggcggcgacccgcgggaggagcgcgccatggtgttcttcttcaaccgcttctacttctgcatcagcctcggctccctcttcgcggtcaccgtgctggtgtacgtccaggacaacgtcggccggggctggggctacggcgtctccgccgtcgccatggtcctcgccgtcgccgtcctcgtcgccggcacgcccaagtaccggtaccgccgccccgaggggagcccgctcaccgtgatcgggcgggtgctggcaacggcgtggaggaagcgccgcctgccgctccccgccgacgccggcgagctccacggctaccacacatccaaggttgcctacaccgaccgcctcaggtgcctggacagggcggccatcatggaggcggacctggcagcgtcgccggcgaagacgaaccagacatcggcggcgccggcggcgacggtgacggaggtggaggaggtgaagatggtggtgaagctgctgcccatctggtcgacctgcatcctcttctggacggtgtactcccagatgaccaccttctccgtcgagcaggccacccgcatggaccgccacctccgcccgggcgccgcccccggcgggttcgccatcccggcgggctccctctccgtcttcctcttcctctccatcctcctcttcacctccctcaacgagcgcgtcctcgtgccggcggcccgccgcctcacccgccgcccccagggcctcacctcgctccagcgcgtcggcgcgggcctcgtcctcgccaccgtcgccatggccacctccgcgctcgtcgagaagaagcggcgcgacgccgccaacgacggcggcggcggcggcatgatcagcgcgttctggctggtgccgcagttcttcctggtgggcgccggcgaggcgttcgcgtacgtcgggcagctggagttcttcatccgcgaggcgccggagcggatgaagtcgatgagcacggggctcttcctggtgacgctgtccatgggattcttcctcagcagcttcctcgtcttcgccgtcgacgccgccacgcggggggcgtggatacggaacgacctcgacgccggcaggctggacctcttctactggatgctggccgtgctcggggtggccaacttcgccgtgttcctcgtgttcgcgaggcgccacgagtacaagcagcccgccggcacggccgccgtggtggtggcgcccgccgctgccaaggacggcggcgccggcgaggagaaggagatggacgacttcgtcgtggtcaaggaggccgtagaagggatggatgtgtag

SEQ ID NO: 56 - protein, 609 aa, Oryza sativa
MVAAGGGHGGGADDGMVVDYRGNPVDKSKTGGWLGAGLILGTELAERVCVMGISMNLVTYLVGDLHLSNAKSANIVTNFMGTLNLLALVGGFLADAKLGRYLTIAISATIAATGVSLLTVDTMVPGMRPPPCADARGAGAHLRCEPARGGQLAMLYAALYTVAAGAGGLKANVSGFGSDQFDGGDPREERAMVFFFNRFYFCISLGSLFAVTVLVYVQDNVGRGWGYGVSAVAMVLAVAVLVAGTPKYRYRRPEGSPLTVIGRVLATAWRKRRLPLPADAGELHGYHTSKVAYTDRLRCLDRAAIMEADLAASPAKTNQTSAAPAATVTEVEEVKMVVKLLPIWSTCILFWTVYSQMTTFSVEQATRMDRHLRPGAAPGGFAIPAGSLSVFLFLSILLFTSLNERVLVPAARRLTRRPQGLTSLQRVGAGLVLATVAMATSALVEKKRRDAANDGGGGGMISAFWLVPQFFLVGAGEAFAYVGQLEFFIREAPERMKSMSTGLFLVTLSMGFFLSSFLVFAVDAATRGAWIRNDLDAGRLDLFYWMLAVLGVANFAVFLVFARRHEYKQPAGTAAVVVAPAAAKDGGAGEEKEMDDFVVVKEAVEGMDV

SEQ ID NO: 57 - DNA, 1785 bp, Nicotiana tabacum
  CDS (1)..(1785)
atggcacttcctgagacacagcaagattcaaaagctttaccagacgcttgggattacaaaggcagaccagcccttagatcctcctctggtggttgggctagtggtgcaatgattttaggtgttgaagctgtggagaggctaacaacactagggattgctgtaaacttagtgacatatttgactggaactatgcatttagggaatgcttcttcagccaacaatgttaccaattttcttggaacttctttcatgctcactttacttggtggttttgtcgccgacactttcctcggaaggtatcttacaattggtatctttgccactgttcaagcaatgggtgttacaatcttgaccatctcaactataatcccaagcctacgaccaccaaaatgtgaacaagttggtagctcatcatgcatccccgcaaatagcaaacaactcatggtcctatatattgccctatacatgacggccctcggcaccggcggcctaaaatcgagcgtctccggctttggcaccgaccaattcgacgattctgacaagaaagaaaagggtcaaatgataaaattcttcgattggttctttttctttattaatgttggctcgctcggtgcagttacggtattggtttatattcaagataatttgggaagagagtggggttatggaatatgtgcatgtgctattgttattgcacttgttgtgttcttatttgggacaaggaaatataggttcaagaaacttggggggagtccattgacacaaattgcttcagttattgtggctgcttggaagaaaaggcatttggaattaccctcagattcttcacttctctttgaaattgatgatatttttggtgaaggaaataaaaaaagcaaacaaaagttgccccatagcaaggagtaccgattcttggacaaggcagccattaaggaagatgatgaccttgaatctaatggcactaacgttgtaatcaacaagtggaaattagcaaccttaaccgatgttgaagaagtaaaaatattaatcagaatgttgccaacttgggccacaactattatgttctggactgtctatgcacaaatgaccacattttctgtgtcacaagctacaacaatggatcgtcacattggaacctttgaaattccacctgctacactcaccgtatttttcgtcggaagtatactcttgaccgtaattttctacgataggattatcgttccgatttgtcgtcgtttcatgaataaacctcatggacttaccccattacaaagaattttcacaggcctagttctttcaattttggccatgattgctgctgccctaacagaggttaagaggctaaaagttgcacatttgcatggattgaccaatgatgcaaatgccacgattccattgactgtattttggttagttccgcaattcttgctagtgggcgcaggtgaagcatttacatatattggccaacttgattttttcttaagggaatgtccaaaagggatgaagacaatgagtacagggctatttttgagtacacttgcacttggatttttctttagttcaattttggttacaattgtgcatgttgtgactgggacaacaaatccatggctagctgataatttgaaccaagggaggttatatgatttctattggcttttggcaatattgagtgtgtttaatttgatgtttttcttgtattcctcaagaaaatatgtgtacaaggaaaagagacttgctgaaatggggattgaattggaagatgatggaccggtttgtcattga

SEQ ID NO: 58 - protein, 594 aa, Nicotiana tabacum
MALPETQQDSKALPDAWDYKGRPALRSSSGGWASGAMILGVEAVERLTTLGIAVNLVTYLTGTMHLGNASSANNVTNFLGTSFMLTLLGGFVADTFLGRYLTIGIFATVQAMGVTILTISTIIPSLRPPKCEQVGSSSCIPANSKQLMVLYIALYMTALGTGGLKSSVSGFGTDQFDDSDKKEKGQMIKFFDWFFFFINVGSLGAVTVLVYIQDNLGREWGYGICACAIVIALVVFLFGTRKYRFKKLGGSPLTQIASVIVAAWKKRHLELPSDSSLLFEIDDIFGEGNKKSKQKLPHSKEYRFLDKAAIKEDDDLESNGTNVVINKWKLATLTDVEEVKILIRMLPTWATTIMFWTVYAQMTTFSVSQATTMDRHIGTFEIPPATLTVFFVGSILLTVIFYDRIIVPICRRFMNKPHGLTPLQRIFTGLVLSILAMIAAALTEVKRLKVAHLHGLTNDANATIPLTVFWLVPQFLLVGAGEAFTYIGQLDFFLRECPKGMKTMSTGLFLSTLALGFFFSSILVTIVHVVTGTTNPWLADNLNQGRLYDFYWLLAILSVFNLMFFLYSSRKYVYKEKRLAEMGIELEDDGPVCH

SEQ ID NO: 59 - DNA, 1785 bp, Nicotiana tabacum
  CDS (1)..(1785)
atggcacttcctgagacacagcaagattcaaaagctttaccagatgcttgggattacaaaggaagaccagctcttagatcctcctctggtggttgggctagtggtgcaatgattttaggtgttgaagctgtggagaggctaacaacactagggattgctgtaaatttggtgacatatttgactggaactatgcatttagggaatgctactgcagccaacaatgttaccaattttcttggaacttctttcatgctcactttatttggtggttttgttgctgacacttttctcggaaggtatcttacaattggtatctttgccactgttcaagcaatgggtgttacaatcttgaccatttccaccataatcccaagcctacggccaccaaaatgcgaacaagttggtagctcatcatgcatccccgcaaatagcaaacaacttatggtcctatacattgccctatacatgacggcgctcggcaccggcggcctaaaatcgagcgtctccggctttggcaccgaccaattcgacgatgctgacaaaaaagaaaaaggtcaaatgataaaattcttcgattggttctttttctttattaatgtaggctcgctcggtgctgttacagtattggtgtatattcaagataatttgggaagagaatggggttatggaatatgtgcatgtgctattgtaattggacttgttgtgttcttatctgggacaagaaaatataggttcaagaaacttgtggggagtccattgacacaaattgcttcagttattgtggctgcttggaaaaaaagacatttggaattactttcagattcttcacttctctttgaaattgatgatatttttggtgaaggaaataaaaaaaacaagcaaaagttgcctcatagcaaggaataccgattcttggacaaggcagcaattaaggaagatcatgatcttgaatctaatggcactaacgttgtaatcaacaagtggaaattagcaaccttaaccgatgttgaagaagtaaaattattaatcagaatgttaccaacttgggccacaactattatgttctggactgtctatgcacaaatgaccacattttctgtgtcacaagctacaacaatggatcgtcacattggaacctttgaaattccaccggcttcactcacagtatttttcgtcggaagtatactcttgaccgtaattttctacgatagggttatcgttcccatttgtcgtcgtttcatgaataaacctcatggacttaccccattacaaagaattttcacagggctagttctttcaattttggccatgatagccgctgccctaacggaggttaagaggctaaaagtggcacatttgcatggattgaccaatgatgcaaatgctacaattcctttgagtgtattttggctagttccgcaattcttgctagtgggggcaggtgaagcatttacatatattggccaacttgattttttcttaagggaatgtccaaaaggaatgaagacaatgagtacagggctgtttttgagtacacttgcattggggtttttctttagttcaattttggttacaattgtgcatgttgtgactgggacaacaaatccatggctagctgataatttgaaccaagggaggttatatgatttctattggcttttggctatattgagtgtgttgaatttgatgtttttcttgtacttttcaagaaaatatgtgtacaaggagaagagacttgctgaaatggggattgaattggaagatgatggaccggtttgtcattga

SEQ ID NO: 60 - protein, 594 aa, Nicotiana tabacum
MALPETQQDSKALPDAWDYKGRPALRSSSGGWASGAMILGVEAVERLTTLGIAVNLVTYLTGTMHLGNATAANNVTNFLGTSFMLTLFGGFVADTFLGRYLTIGIFATVQAMGVTILTISTIIPSLRPPKCEQVGSSSCIPANSKQLMVLYIALYMTALGTGGLKSSVSGFGTDQFDDADKKEKGQMIKFFDWFFFFINVGSLGAVTVLVYIQDNLGREWGYGICACAIVIGLVVFLSGTRKYRFKKLVGSPLTQIASVIVAAWKKRHLELLSDSSLLFEIDDIFGEGNKKNKQKLPHSKEYRFLDKAAIKEDHDLESNGTNVVINKWKLATLTDVEEVKLLIRMLPTWATTIMFWTVYAQMTTFSVSQATTMDRHIGTFEIPPASLTVFFVGSILLTVIFYDRVIVPICRRFMNKPHGLTPLQRIFTGLVLSILAMIAAALTEVKRLKVAHLHGLTNDANATIPLSVFWLVPQFLLVGAGEAFTYIGQLDFFLRECPKGMKTMSTGLFLSTLALGFFFSSILVTIVHVVTGTTNPWLADNLNQGRLYDFYWLLAILSVLNLMFFLYFSRKYVYKEKRLAEMGIELEDDGPVCH

SEQ ID NO: 61 - DNA, 1773 bp, Nicotiana tabacum
  CDS (1)..(1773)
atggcacttcctgaaacacaacaagatacaaaaactctcccagatgcctgggattacaaaggtcgaccagctgttcgatcctcgtccggcggttggtccagcgccgccatgattttagggattgaggcagtggagaggctaacgacgttaggtattgctgtaaatctggtgacatacttgactggaaccatgcatttaggaaatgctagttcggccaacaacgttacaaattttcttggaacttcatttatgctcactttgcttggtggtttcgtagccgacacttttcttggacgatatcttacaattggcatctttaccactattcaagccatgggtgttaccatattgaccatctccacaataatcccaagcctacgaccaccaaagtgttccccagggagctcaacatgcattccagcaagttccaaacaactcatggttctatacatagcactatacatgacggcgctcggcaccggcggcctgaaatccagcgtctccggcttcggttcagaccagttcgacgaaaccgacaagaaagaaagaggacagatgataaaattcttcaactggttctttttcttcattaatgtgggatcacttggtgcagtgacagtactagtgtatattcaagataatttgggaagagaatatggttatggaatatgtgcttgtgctattgttattggtttggtcatattcttatcgggcacaagaaaatatcgtttcaagaaacttgtgggaagtccattgacacaaattgcttcagtttttgtggctgcttggaacaaaaggcatatggaattgccttctgattcttctcttttatacaatattgatgatattcctggggatggaaacaaaaaagctaagcagaggttgcctcacagcaaggaattccgtttcttggacaaggcagccattaaagtacaggaccctgaatccgctggaattaccgtggtaaataaatggaacttatcaactttaaccgacgttgaagaagtaaaattggtagtccgaatgttaccaacatgggccacgaccattatgttttggactgtctatgctcaaatgacaacattttccgtgtcacaagctacaaccatggaccgtcacatcggaaatttcgaaattcctccggcttcattgacactcttcttcgtcggaagtatcctcctaacgtgcatattctacgaccgcgctgtcgttccggtttgccgacgtgtcctcaacaaccctcacggtacaagcccgttgcaacgtattgcagttggcttaatcctttcaattatagccatgattgctgctgctttaactgaagtgaaaagattgaatgttgcacatttgcatggattgaccaatgatgctaatgcaaaggttcctttgagtgttttttggttagtcccacaattcttgctagtaggggcaggtgaggcatttacttacattggacaacttgatttctttctaagggaatgtcctaaagggatgaagacaatgagcacagggttattcttgagtacactttcactagggtttttctttagttctattttggtgactatagtgcacaaggtgacagggaaaaacccatggttagctgataatttaaaccaagggaggctctatgatttctattggctattggcaacgttgagtgtgttgaatttgatgattttcttgtttatttcgagacggtatgtgtacaaggagaagaggcttgctgagtgtgggattgaaatggaggattcagaaccagcttgccactaa

SEQ ID NO: 62 - protein, 590 aa, Nicotiana tabacum
MALPETQQDTKTLPDAWDYKGRPAVRSSSGGWSSAAMILGIEAVERLTTLGIAVNLVTYLTGTMHLGNASSANNVTNFLGTSFMLTLLGGFVADTFLGRYLTIGIFTTIQAMGVTILTISTIIPSLRPPKCSPGSSTCIPASSKQLMVLYIALYMTALGTGGLKSSVSGFGSDQFDETDKKERGQMIKFFNWFFFFINVGSLGAVTVLVYIQDNLGREYGYGICACAIVIGLVIFLSGTRKYRFKKLVGSPLTQIASVFVAAWNKRHMELPSDSSLLYNIDDIPGDGNKKAKQRLPHSKEFRFLDKAAIKVQDPESAGITVVNKWNLSTLTDVEEVKLVVRMLPTWATTIMFWTVYAQMTTFSVSQATTMDRHIGNFEIPPASLTLFFVGSILLTCIFYDRAVVPVCRRVLNNPHGTSPLQRIAVGLILSIIAMIAAALTEVKRLNVAHLHGLTNDANAKVPLSVFWLVPQFLLVGAGEAFTYIGQLDFFLRECPKGMKTMSTGLFLSTLSLGFFFSSILVTIVHKVTGKNPWLADNLNQGRLYDFYWLLATLSVLNLMIFLFISRRYVYKEKRLAECGIEMEDSEPACH

SEQ ID NO: 63 - DNA, 1773 bp, Nicotiana tabacum
  CDS (1)..(1773)
atggcacttcctgaaacacaacaagatactaaaactctcccagatgcctgggattacaaaggtcgaccagctgttcgttcctcgtccggcggttggtccagcgccgccatgattttagggattgaggcagtggagaggctgacgacgttaggtattgctgtaaatctggtgacatatttgactggaaccatgcatttaggaaatgctagttcggccaacaatgttactaattttcttggaacttcatttatgctcactttgcttggtggtttcgtagccgacacttttcttggacggtatcttacaattggtatctttaccactattcaagccatgggtgttaccatattgaccatctccaccataatcccaagcctacgaccaccaaagtgttccccagggagctcaacatgcattccagcaagttccaaacaactcatggttctatacatagcactatacatgacggcgctcggcaccggcggcctgaaatccagcgtctccggcttcggttccgatcaattcgacgaaaccgacaagaaagaaagaggacagatgataaaattcttcaactggttctttttcttcattaacgtgggatcccttggtgcagtgacagtactagtgtatattcaagataatttgggaagagaatatggttatggaatatgtgcttgtgctattgttattggtttggtcatattcttatcgggcacaagaaaatatcgtttcaagaaacttgtgggaagtccattgacacaaattgcttcagtttttgtggctgcttggaacaaaagacatatggatttgccttctgattcttatcttctatataatattgatgatattcctggggatggaaataaaaaagctaagcagagattgcctcacagcaaggaattccgtttcttggacaaggcagctattaaagtacaggaccctgaatccgctggaattaccgtggtaaataaatggaacttatcaactttaaccgacgttgaagaagtaaaattggtagtccgaatgttaccaacatgggccacgaccattatgttttggactgtctatgctcaaatgacaacattttcagtgtcacaagctacaacaatggaccgtcacatcggaaatttcgaaattcctccggcctcattgacacttttcttcgtcggaagtatcctcttaacgtgcatattctacgaccgtgccgtcgtaccggtttgtcgacgtgtcctaaacaatcctcacggtacaaccccgttgcaacgtattgcagttggattaatactttcaattatagccatggttgctgctgctttaactgaagtgaagagattgaatgttgcacatttgcatggattgaccaatgatgcaaatgccaaggttcctttgagtgttttttggttagttccgcaattcttgctagtaggggcaggtgaggcatttacttatatcggacaacttgatttcttcctaagggagtgtcctaaaggaatgaagacaatgagcacggggttattcttgagtacactttcattagggtttttctttagttctattttggtgactatagtgcataaggtgacagtgaaaaacccatggttagctgataatttaaaccaaggaagactctatgatttctattggctattggcaacgttgagtgtgttgaatttgatgattttcttgtttatttcaagacggtatgtgtacaaggagaagagacttgctgaatgtgggattgaaatggaggattcagaaccagcttgccactaa

SEQ ID NO: 64 - protein, 590 aa, Nicotiana tabacum
MALPETQQDTKTLPDAWDYKGRPAVRSSSGGWSSAAMILGIEAVERLTTLGIAVNLVTYLTGTMHLGNASSANNVTNFLGTSFMLTLLGGFVADTFLGRYLTIGIFTTIQAMGVTILTISTIIPSLRPPKCSPGSSTCIPASSKQLMVLYIALYMTALGTGGLKSSVSGFGSDQFDETDKKERGQMIKFFNWFFFFINVGSLGAVTVLVYIQDNLGREYGYGICACAIVIGLVIFLSGTRKYRFKKLVGSPLTQIASVFVAAWNKRHMDLPSDSYLLYNIDDIPGDGNKKAKQRLPHSKEFRFLDKAAIKVQDPESAGITVVNKWNLSTLTDVEEVKLVVRMLPTWATTIMFWTVYAQMTTFSVSQATTMDRHIGNFEIPPASLTLFFVGSILLTCIFYDRAVVPVCRRVLNNPHGTTPLQRIAVGLILSIIAMVAAALTEVKRLNVAHLHGLTNDANAKVPLSVFWLVPQFLLVGAGEAFTYIGQLDFFLRECPKGMKTMSTGLFLSTLSLGFFFSSILVTIVHKVTVKNPWLADNLNQGRLYDFYWLLATLSVLNLMIFLFISRRYVYKEKRLAECGIEMEDSEPACH

SEQ ID NO: 65 - DNA, 1773 bp, Arabidopsis thaliana
  CDS (1)..(1773)
atggttcatgtgtcatcatctcatggagccaaagatggctctgaagaatcctttgattacagaggaaacccaccagataagtctaaaaccggtggatggttaggcgccggtttaattttagggagcgagctatcagagagaatatgcgtgatgggcatatcaatgaatctagtgacgtaccttgttggagatttacacatctcatcagctaaatcagcgaccatagtcaccaacttcatgggaactcttaaccttctagggcttctcggtggttttttggctgacgctaaactcggtcgctacaagatggttgcaatctcagcttctgtcacagctctgggagtgttgcttttgacggtggctacaactatctcaagcatgagaccaccaatatgtgacgatttcaggagacttcatcatcagtgcatagaagcaaacggacaccagttggctcttctctatgttgctctctataccatagctctaggcggaggaggaatcaaatccaacgtctctggttttgggtctgaccagttcgatactagtgatcctaaagaagagaaacagatgattttcttcttcaacagattctatttctccatcagcgttggctctctcttcgccgtgattgctcttgtttacgttcaggacaacgtcgggagaggctggggttacgggatctctgccgcgactatggtggttgcagccattgttttactctgcggaacgaaacggtaccgtttcaagaaacctaaaggaagcccttttacaacaatatggagggttggtttcttggcttggaagaaaagaaaggagagttaccctgcgcatccaagtcttttgaacggttatgacaacaccacggttccacacacagagatgcttaagtgtttaaacaaagccgcaatttccaagaacgagagctctcctagctcgaaggacttcgaagagaaggatccgtggatcgtttcgactgttacacaagtcgaagaagtgaaactcgtgatgaaattggtaccgatttgggcaacgaacattcttttctggacgatttactcccaaatgacgactttcacggtcgaacaagcgacgtttatggaccgaaaactcggatctttcactgttcctgcaggctcttactctgctttcctcatactcacaattctcctcttcacttcccttaacgagagagtctttgttcctttaacaagaaggctcacaaaaaagcctcaaggaatcacaagcctacagagaatcggagtagggctagtattctcaatggctgcaatggctgtagccgcggttatagagaacgctagacgcgaggcagcggttaacaacgataagaaaataagcgcgttttggttggttccacaatatttcttagtcggtgcgggtgaggcctttgcttacgttggacagcttgagttctttataagagaagcaccagagaggatgaaatcgatgagcaccggattgtttctaagcacgatatcgatgggattcttcgtgagtagcttgcttgtttcgcttgttgatagggttacagacaaaagctggcttagaagtaaccttaacaaagcgagattgaactacttctactggttacttgttgtcttgggagcattgaacttcttgatttttattgtgtttgccatgaaacatcagtataaagctgatgtgattactgttgttgtgactgatgatgattcagtggagaaggaagtgacgaagaaagagagctctgaatttgagcttaaggacattccttga

SEQ ID NO: 66 - protein, 590 aa, Arabidopsis thaliana
MVHVSSSHGAKDGSEESFDYRGNPPDKSKTGGWLGAGLILGSELSERICVMGISMNLVTYLVGDLHISSAKSATIVTNFMGTLNLLGLLGGFLADAKLGRYKMVAISASVTALGVLLLTVATTISSMRPPICDDFRRLHHQCIEANGHQLALLYVALYTIALGGGGIKSNVSGFGSDQFDTSDPKEEKQMIFFFNRFYFSISVGSLFAVIALVYVQDNVGRGWGYGISAATMVVAAIVLLCGTKRYRFKKPKGSPFTTIWRVGFLAWKKRKESYPAHPSLLNGYDNTTVPHTEMLKCLNKAAISKNESSPSSKDFEEKDPWIVSTVTQVEEVKLVMKLVPIWATNILFWTIYSQMTTFTVEQATFMDRKLGSFTVPAGSYSAFLILTILLFTSLNERVFVPLTRRLTKKPQGITSLQRIGVGLVFSMAAMAVAAVIENARREAAVNNDKKISAFWLVPQYFLVGAGEAFAYVGQLEFFIREAPERMKSMSTGLFLSTISMGFFVSSLLVSLVDRVTDKSWLRSNLNKARLNYFYWLLVVLGALNFLIFIVFAMKHQYKADVITVVVTDDDSVEKEVTKKESSEFELKDIP

SEQ ID NO: 67 - DNA, 1734 bp, Arabidopsis thaliana
  CDS (1)..(1734)
atggagagcaaagggagttggacagtggctgatgccgtagactacaaaggacgacctgccgacaaatccaaaaccggtggttggatcactgccgctctcattcttgggatagaagttgtggagaggctatcaacaatgggaatagcagtgaatttggtaacatatttgatggagacaatgcatctcccaagttcaacctctgccaacattgtcactgatttcatgggcacttccttcctcctatgcttgctcggtggttttctcgctgactccttcctcggccgtttcaaaaccatcggcattttctcaaccattcaagctctgggaactggtgctctagcggtagcaactaagctgccagagctacgtccaccaacatgccatcatggagaagcttgcatacccgcgaccgccttccaaatgacaattctttatgtttcgctttaccttatagcccttggaactggtggtcttaaatctagtatctctggatttgggtctgaccagtttgatgacaaagatcctaaagagaaagctcacatggctttcttcttcaacaggttcttcttctttattagtatggggacattattggctgtgactgttttagtttacatgcaagatgaagtgggaagatcttgggcttatggaatctgcactgtctctatggctatagctattgtaatattcttgtgtgggactaagagataccgttataagaagagccaaggaagtcccgttgtgcaaatatttcaggtcatagcagctgcgttccgaaagaggaaaatggaactacctcaaagcattgtttatctttatgaagataaccctgaaggcattagaattgaacatactgatcagtttcacttgttggacaaggcggccatagttgcagaaggagattttgaacaaacccttgatggagttgcaatcccaaacccttggaagctaagctcagtgaccaaagttgaggaagtaaaaatgatggttaggcttttgcctatttgggcaacaactataattttttggacaacatatgcccaaatgattacattctctgttgagcaagcttcaactatgagacgtaacattggaagctttaagatcccagctggttccctcaccgtgtttttcgttgcggctattctcataactctagctgtctacgaccgtgccataatgcctttttggaagaaatggaaaggaaaaccaggtttctctagcctacaaagaatagctattggattggtcttatcaaccgctggaatggcagctgcagctctagtagagcaaaagcgtttatgcgttgcgaaatctagttcacaaaaaacattgcctataagtgtgtttttacttgttccacaattcttcttagtaggagctggggaagcctttatctacactggccaacttgatttcttcataacacaatcgcctaagggaatgaaaactatgagcactggactcttcttgaccactttatcactaggtttctttgtcagcagtttcttggtctcaatcgtcaagagggtcacttcaacttctactgatgtaggatggctggctgataacattaaccacggccgactcgattacttttattggcttttagtcattctcagtggaattaacttcgttgtctatatcatatgtgccttgtggtttaagccaacgaagggtaaagactcagtagagaaggaaaatggcaagggattttcagttgaagactgctga

SEQ ID NO: 68 - protein, 577 aa, Arabidopsis thaliana
MESKGSWTVADAVDYKGRPADKSKTGGWITAALILGIEVVERLSTMGIAVNLVTYLMETMHLPSSTSANIVTDFMGTSFLLCLLGGFLADSFLGRFKTIGIFSTIQALGTGALAVATKLPELRPPTCHHGEACIPATAFQMTILYVSLYLIALGTGGLKSSISGFGSDQFDDKDPKEKAHMAFFFNRFFFFISMGTLLAVTVLVYMQDEVGRSWAYGICTVSMAIAIVIFLCGTKRYRYKKSQGSPVVQIFQVIAAAFRKRKMELPQSIVYLYEDNPEGIRIEHTDQFHLLDKAAIVAEGDFEQTLDGVAIPNPWKLSSVTKVEEVKMMVRLLPIWATTIIFWTTYAQMITFSVEQASTMRRNIGSFKIPAGSLTVFFVAAILITLAVYDRAIMPFWKKWKGKPGFSSLQRIAIGLVLSTAGMAAAALVEQKRLCVAKSSSQKTLPISVFLLVPQFFLVGAGEAFIYTGQLDFFITQSPKGMKTMSTGLFLTTLSLGFFVSSFLVSIVKRVTSTSTDVGWLADNINHGRLDYFYWLLVILSGINFVVYIICALWFKPTKGKDSVEKENGKGFSVEDC

SEQ ID NO: 69 - DNA, 1767 bp, Brassica napus
  CDS (1)..(1767)
atgtctcttcctgaaacaaaatctcaaactcttttagatgcttgggactttcaaggccgccctgccgatcgctctaaaaccggtggatgggctagcgccgcgatgattctctgtattgaggcggtagagaggctgacaactttaggtatcggcgttaatttagtgacttatttgacgggaactatgcatttaggcaatgcaacagcggctaacaccgttaccaacttcctcggaacttcattcatgctctgtctcctcggtggcttcatagctcacacctttcttggaaggtacttaacgattgctatattcgccgcaatccaagccacgggtgtttcgattttaaccctctcaactattataccgggatttcaaccaccaagatgtccaacgacgtcgtctcactgcgtacaaccaagtggaatacaactgacggttctgtacttagccttatacctcactgccctaggtacaggaggtgtgaaggcaagtgtctccggttttgggtcagaccaattcgatgagactgaaccgaaagaacagtcacaaatgacatatttcttcaaccgcttcttcttttgtataaatgttggctctcttttagccgtgacggtccttgtctacatgcaagacgatgttggacgcaaatggggatatggcctttgcgcgctggcaatcgtgctttcactaagcattttcttggccggaactaatcgctaccggttcaagaagttgattggtagcccgatgactcaagttgcggcggttattgtggcggcgtggtggaataggcggctcgagttgccatcggacccgtcgtttctatatgacttggacgatgttattgcggctgaaggttcgatgaagagtaaacaaaagttgccgcataccaatcagttccggtcattggacaaagcagcgataaaggaccaagaaatggcaatgacccaaaacgtatacaacaaatggacactatcaacagtaactgatattgaggaagtgaaacaaattgtacggatgttaccaatttgggcaacatgcatcctcttttggactgtccatgctcaactaacgacattatcggtcgcgcagtccgagaccatggaccgtcacattgggagctttgagatccctccagccgcaatggccgtattctatatcggtggcctcctcctaaccaccgccgtctacgaccgtctcgcgattcccttatgcaaaaagctattcaactacccccacggtctgagacctcttcaacgcattggtttgggtctcttacttgcagccatgggtatggccgtagctgctttggtcgagatcaaacgtcttagaacagcacatgcccacggtccaacagtcaaaacccttcctctagggttttctctactcatcccacaataccttattgtgggtatcggcgaggcgttgatctacacaggacagctagattttttcttgagagagtgtcctaaaggtatgaaaacaatgagcacgggtttattgttgagcacattggctttagggtttttcttcagctcggttctcgtaaccatcgttgagaaagtcactgataaagctcatccgtggatagctgatgatctcaacaagggccgtctatacaatttctattggcttgtggcagtaattgttgctttgaacttcctcgttttccttgttttctccaagtggtacgtctacaaggagaagagactagctgaccttgggattgagttggaagacgagccagacattcccatgggtcattga

SEQ ID NO: 70 - protein, 588 aa, Brassica napus
MSLPETKSQTLLDAWDFQGRPADRSKTGGWASAAMILCIEAVERLTTLGIGVNLVTYLTGTMHLGNATAANTVTNFLGTSFMLCLLGGFIAHTFLGRYLTIAIFAAIQATGVSILTLSTIIPGFQPPRCPTTSSHCVQPSGIQLTVLYLALYLTALGTGGVKASVSGFGSDQFDETEPKEQSQMTYFFNRFFFCINVGSLLAVTVLVYMQDDVGRKWGYGLCALAIVLSLSIFLAGTNRYRFKKLIGSPMTQVAAVIVAAWWNRRLELPSDPSFLYDLDDVIAAEGSMKSKQKLPHTNQFRSLDKAAIKDQEMAMTQNVYNKWTLSTVTDIEEVKQIVRMLPIWATCILFWTVHAQLTTLSVAQSETMDRHIGSFEIPPAAMAVFYIGGLLLTTAVYDRLAIPLCKKLFNYPHGLRPLQRIGLGLLLAAMGMAVAALVEIKRLRTAHAHGPTVKTLPLGFSLLIPQYLIVGIGEALIYTGQLDFFLRECPKGMKTMSTGLLLSTLALGFFFSSVLVTIVEKVTDKAHPWIADDLNKGRLYNFYWLVAVIVALNFLVFLVFSKWYVYKEKRLADLGIELEDEPDIPMGH

SEQ ID NO: 71 - DNA, 2011 bp, Glycine max
  CDS (68)..(1825)
agcttcccacctagctaggcctttctattgtagcactcaagtttctttcttcgtggaacttaagaaaatgaaggaaaaaatgagttggacagttgcagacgccgtggactataaaggcttccctgcagacaggtccaaaacaggtggttgggtacccgcagctcttattttagggattgaaatcgtggagaggctctccaccatggggattgcagtgaacctggtaacatacatgatctcaatcatgcatctgccaagctcaactgcagccaacactgtgactgactttatgggcacatcatttctcctgtgtttgctgggaggttttctagcagattccttccttggcagatacaagacaattggaatctttgcttcaatacaaacactgggtactgctacattagcaatctcaacaaaattgccagggctacgtccaccaccttgccatgctaacagtgacagctgcaaacaagccaacggattccaaatgggaatcttgtacttgtcactgtaccttattgcactaggaactggtggcctcaagtccagtgtttcaggatttggttctgaccaattcgatgagaaagatgagaaggagaaatcgcaaatggcctattttttcaacaggtttttcttcttcatcagttttggaactctggcagctgtcacagtacttgtctatctgcaagatgaagtgagtcgcagcttggcgtatggaatatgttctgtctctatgatcatagccattatcgtgttcttatcaggaactaaaagatacagatacaagaggagtttggggagccccattgtccacattttccaagttattgctgcatcaataaagaaaagaaagatgcaactcccatacaatgttggttctttgtatgaggacactcccgaggcttcaagaatagagcacaccgaacagttccgtttcttggagaaagcagccattgtggcagaagatgattttgagacaaatttatgtggttctggaccaaacccatggaaattatgctcactaacaagggtagaggaggtgaaaatgatggtgagacttctgccagtgtgggccacaaccatcatattttggaccatttacgcacagttgatcaccttttcagttgagcaagcctccaccatggaaaggaatattgggagtttccaaatccctgcaggctctgtcacagtcttttttgtggctgcaatactaatcactctggctgtctatgaccgactcatcatgcccctttggaaaaagtggaacggcaaaccaggtttcactgacctacaaaggatagcaattgggcttgtattttccatttttggaatggcggctgcttctgtatgcgagaggaaacggttatccgttgcaaaaagtgttagtggcggcaaccaagcaacaacaacacttcctataagcgttttccttctgatcccacagttcttcttggtgggttctggtgaagcattcatatacacaggccaacttgatttcttcataacacggtcaccaaaaggaatgaaaaccatgagcactggtctctttctcacaactttgtctctcggtttcttcttcagcagtttccttgtctcggttgttaagaaagttactgggacaagagatgggcaagggtggctagcagacagcataaacaagggcaggctcgatttgttctatgcactgcttaccatacttagtttcgttaactttgcagcatttgcggtatgtgcagtttggttcaaacctaagaaacctaaacaaccagctgctatgcaaatggggccagttaatgggtccacagcagaggaaaagtgctgaaggctgaatagtttttaggatttggggattatatatatagtctttatacccattattaatgctatcatatggttttgctgctttgtagataggctgttatgtgtatgtatccgaagaatggattgattttgtgtttctcttcctgatattatagaataatgtttgggttggcaaaaaaaaaaaaaa

SEQ ID NO: 72 - protein, 585 aa, Glycine max
MKEKMSWTVADAVDYKGFPADRSKTGGWVPAALILGIEIVERLSTMGIAVNLVTYMISIMHLPSSTAANTVTDFMGTSFLLCLLGGFLADSFLGRYKTIGIFASIQTLGTATLAISTKLPGLRPPPCHANSDSCKQANGFQMGILYLSLYLIALGTGGLKSSVSGFGSDQFDEKDEKEKSQMAYFFNRFFFFISFGTLAAVTVLVYLQDEVSRSLAYGICSVSMIIAIIVFLSGTKRYRYKRSLGSPIVHIFQVIAASIKKRKMQLPYNVGSLYEDTPEASRIEHTEQFRFLEKAAIVAEDDFETNLCGSGPNPWKLCSLTRVEEVKMMVRLLPVWATTIIFWTIYAQLITFSVEQASTMERNIGSFQIPAGSVTVFFVAAILITLAVYDRLIMPLWKKWNGKPGFTDLQRIAIGLVFSIFGMAAASVCERKRLSVAKSVSGGNQATTTLPISVFLLIPQFFLVGSGEAFIYTGQLDFFITRSPKGMKTMSTGLFLTTLSLGFFFSSFLVSVVKKVTGTRDGQGWLADSINKGRLDLFYALLTILSFVNFAAFAVCAVWFKPKKPKQPAAMQMGPVNGSTAEEKC

SEQ ID NO: 73 - DNA, 1770 bp, Brassica napus
  CDS (1)..(1770)
atgtctctacctgaaactaaaacacaaacccttctcgatgcttgggacttccaaggccgcccagccgatcgttctaagaccggtggatgggccagcgccgccatgattctctgtattgaggcggtggagcggttgacgacgttaggtatcggcgttaatctagtgacgtatttgacaggaactatgcatctaggcaatgcaacggcagctaacaccgtcaccaacttcctcggaacttcgttcatgctctgtctcctcggtggcttcatagcggacacctttcttggaaggtacctaaccattgctatattcgccgctatccaagccacaggtgtttcgatcttaaccctctcaactatcataccgggactgagaccaccaagatgcaacccaacaacctcgtctcattgcgtacaagcgaatggaatacaactgacggttctatacttagccttatacctcacggccctaggaacaggaggagtgaaggcaagcgtctccggctttgggtcagaccaattcgatgagactgaaccgaaagaacagtcacaaatgacatatttcttcaaccgcttcttcttttgtatcaacgttggctctcttttagccgtgacggtccttgtctacatacaagacgatgttggacgcaaatggggatatggcatatgcgcgttgtcaatcgtacttgcactaagcatattcttggccggtacaaaccgctaccgttttaagaagttgatcggtagccccatgacacaagttgcaacggttattgtggcggcgtggaggaatagaaggttagagttgccgtcggatccgtcgtttctatacgacttggacgatgttattgcggcggaaggcgcgatgaagagtaaacaaaagctgccgcataccaaacaattccgttcgttagacaaggcagcaataaagaaccaagaaacggcaatgacccaaaacgtattcaacaaatggacactttcaacactaaccgatgttgaggaagtgaaacaaatcgtacggatgttaccaatttgggcaacatgcatcctcttttggaccgtccatgctcaattaacgacattatcagtcgcacaatccgagaccatggaccgtcacattgggagctttgagatccctccagccgcaatggccgtattctatatcggtggcctcctcctaaccaccgccgtctacgaccgtctcgccattcccctatgcaaaaagctattcaactacccccacggtctaagaccacttcaacgcattggtttgggtctcttactcgcagccatgggtatggccgtagctgctttggtcgagatcaaacgtcttagaaccgcacattcccatggtccaacagtcaaaacgcttcctctagggttttatctactcatcccacaataccttattgttggtatcggagaagcgttgatatacacaggacaattagatttcttcttaagagagtgtcctaaaggtatgaaaacgatgagcacggggctattactgagcacattagcgttaggattcttcttcagctcggttctcgtaaccatcgttgagaaagtcactgataaagctcatccgtggatagctgatgatctcaacaagggccgtctatacaatttctattggcttgtggcaataattgttgctttgaacttcctcattttcctcgttttctccaaggggtacgtctacaaggacaagagactagctgaccttgggattgagttggaagatgagccagacattccaatgggccattga

SEQ ID NO: 74 - protein, 589 aa, Brassica napus
MSLPETKTQTLLDAWDFQGRPADRSKTGGWASAAMILCIEAVERLTTLGIGVNLVTYLTGTMHLGNATAANTVTNFLGTSFMLCLLGGFIADTFLGRYLTIAIFAAIQATGVSILTLSTIIPGLRPPRCNPTTSSHCVQANGIQLTVLYLALYLTALGTGGVKASVSGFGSDQFDETEPKEQSQMTYFFNRFFFCINVGSLLAVTVLVYIQDDVGRKWGYGICALSIVLALSIFLAGTNRYRFKKLIGSPMTQVATVIVAAWRNRRLELPSDPSFLYDLDDVIAAEGAMKSKQKLPHTKQFRSLDKAAIKNQETAMTQNVFNKWTLSTLTDVEEVKQIVRMLPIWATCILFWTVHAQLTTLSVAQSETMDRHIGSFEIPPAAMAVFYIGGLLLTTAVYDRLAIPLCKKLFNYPHGLRPLQRIGLGLLLAAMGMAVAALVEIKRLRTAHSHGPTVKTLPLGFYLLIPQYLIVGIGEALIYTGQLDFFLRECPKGMKTMSTGLLLSTLALGFFFSSVLVTIVEKVTDKAHPWIADDLNKGRLYNFYWLVAIIVALNFLIFLVFSKGYVYKDKRLADLGIELEDEPDIPMGH

SEQ ID NO: 75 - DNA, 1761 bp, Glycine max
  CDS (1)..(1761)
atgagcaacctccctacaactcaagggaaagccatccctgatgcctccgactacaagggccgccccgccgagcgctctaaaaccggtggctggaccgcttccgccatgatattaggaggagaagtgatggagaggttgacaacactaggcatcgcggtgaatttggtaacatatttgactgggaccatgcatttgggtaatgctgcctctgccaacgttgtaaccaacttcttgggaacctccttcatgctctgtctgctcggtggcttcctcgccgatacttttctcggaagataccgcaccatcgccatcttcgctgccgttcaagcaactggtgtgacaatcttgacaatatcaaccataattccgagccttcaccctccaaagtgcaacggagacaccgtgccaccttgcgtgagagcaaatgagaaacaattaacggtgctttatttggcgctttatgtaacggcgctcggcaccggaggtttgaaatcgagtgtgtccgggttcggttcggatcagttcgatgattcggacgacgacgagaagaagcagatgataaagttcttcaactggttctacttcttcgtgagcatagggtctctggccgcaaccacggttcttgtgtacgtacaagacaacataggacgaggttggggttatggtatctgcgcgggtgcgatcgtggtggcacttctcgtgttcttgtcgggtacgaggaagtaccgtttcaagaaacttgtgggaagtccattaactcagtttgcggaagtgttcgtggctgctctgagaaagaggaacatggaattgccctctgattcatcattgctctttaatgactacgaccccaagaagcagactcttcctcatagcaagcagttccgtttcttggacaaagctgcaatcatggattcatcagaatgcggaggtggaatgaagaggaaatggtatctttgcaccctaacagacgtggaagaagtgaaaatgattctaagaatgctacccatatgggccaccaccatcatgttttggacaatccacgctcaaatgaccacattctcggtgtcacaagcgacaaccatggaccgtcacataggaaaaacatttcaaatgcccgcggcatcaatgaccgttttcttaattggaacaattctcctaactgtccccttctacgaccgtttcattgttcccgtggcaaagaaagtgctcaagaatccacatggtttcacccctttgcaacgcattggagtcggtttagtactctcagtggtttccatggtggtaggagcactgatagaaataaagagactaagatatgcccaatcacatggtttggtagataagccagaagcaaagatccctatgaccgtgttttggttgataccacagaacttgtttgtgggggcaggggaggcatttatgtacatggggcagttggactttttccttagagagtgtcccaaagggatgaaaacaatgagcacgggattgttcttgagcacactctctttggggtttttctttagcaccttgttagtgtctatagtgaacaaaatgacagcacatggtaggccatggctcgcagataatcttaaccaagggaggctctatgacttttactggctcttggctatattgagtgctataaatgtggtgttatacttggtttgtgctaagtggtacgtctacaaggagaagaggcttgctgaagagggcattgaattggaagaaacagatgatgctgctttccatggccattga

SEQ ID NO: 76 - protein, 586 aa, Glycine max
MSNLPTTQGKAIPDASDYKGRPAERSKTGGWTASAMILGGEVMERLTTLGIAVNLVTYLTGTMHLGNAASANVVTNFLGTSFMLCLLGGFLADTFLGRYRTIAIFAAVQATGVTILTISTIIPSLHPPKCNGDTVPPCVRANEKQLTVLYLALYVTALGTGGLKSSVSGFGSDQFDDSDDDEKKQMIKFFNWFYFFVSIGSLAATTVLVYVQDNIGRGWGYGICAGAIVVALLVFLSGTRKYRFKKLVGSPLTQFAEVFVAALRKRNMELPSDSSLLFNDYDPKKQTLPHSKQFRFLDKAAIMDSSECGGGMKRKWYLCTLTDVEEVKMILRMLPIWATTIMFWTIHAQMTTFSVSQATTMDRHIGKTFQMPAASMTVFLIGTILLTVPFYDRFIVPVAKKVLKNPHGFTPLQRIGVGLVLSVVSMVVGALIEIKRLRYAQSHGLVDKPEAKIPMTVFWLIPQNLFVGAGEAFMYMGQLDFFLRECPKGMKTMSTGLFLSTLSLGFFFSTLLVSIVNKMTAHGRPWLADNLNQGRLYDFYWLLAILSAINVVLYLVCAKWYVYKEKRLAEEGIELEETDDAAFHGH

SEQ ID NO: 77 - DNA, 1758 bp, Glycine max
  CDS (1)..(1758)
atgaaggaaaaaatgagttggacagttgcagacgccgtgaactataaaggcttccctgcagacaggtccaaaacaggtggttgggtacccgcagctcttattttagggattgaaatagtggagaggctctccaccatggggattgcagtgaacctggtaacatacatgatctcaatcatgcatctgccaagctcaactgcagccaacactgtgactgactttatgggcacatcatttctcctgtgtttgctgggaggttttctagcagattccttccttggcagatacaagacaattggaatctttgcttcaatacaaacactgggtactgctacattagcaatctcaacaaaattgccagggctacgtccaccaccttgccatgctaacagtgacagctgcaaacaagccaacggattccaaatgggaatcttgtacttgtcactgtaccttattgcactaggaactggtggcctcaagtccagtgtttcaggatttggttctgaccaattcgatgagaaagatgagaaggagaaatcgcaaatggcctattttttcaacaggtttttcttcttcatcagttttggaactctggcagctgtcacagtacttgtctatctgcaagatgaagtgagtcgcagcttggcgtatggaatatgttctgtctctatgatcatagccattatcgtgttcttatcaggaactaaaagatacagatacaagaggagtttgggaagccccattgtccacattttccaagttatagcagcatcaataaagaaaagaaagaggcaactcccatacaatgttggttctttgtatgaggacactcccgaggcttcaagaatagagcacaccgaacagttccgtttcttggagaaagcagccattgtggcagaagatgattttgagacaaatttatgtggttctggaccaaacccatggaaattatgctcactaacaagggtagaggaggtgaaaatgatggtgagacttctgccagtgtgggccacaaccatcatattttggaccatttacgcacagttgatcaccttttcagttgagcaagcctccaccatggaaaggaatattgggagtttccaaatccctgcaggctctgtcacagtcttttttgtggctgcaatactaatcactctggctgtctatgaccgactcatcatgcccctttggaaaaagtggaacggcaaaccaggtttcactgacctacaaaggatagcaattgggcttgtattttccatttttggaatggcggctgcttctgtatgcgagaggaaacggttatccgttgcaaaaagtgttagtggcggcaaccaagcaacaacaacacttcctataagcgttttccttctgatcccacagttcttcttggtgggttctggtgaagcattcatatacacaggccaacttgatttcttcataacacggtcaccaaaaggaatgaaaaccatgagcactggtctctttctcacaactttgtctctcggtttcttcttcagcagtttccttgtctcggttgttaagaaagttactgggacaagagatgggcaagggtggctagcagacagcataaacaagggcaggctcgatttgttctatgcactgcttaccatacttagtttcgttaactttgcagcatttgcggtatgtgcagtttggttcaaacctaagaaacctaaacaaccagctgctatgcaaatggggccagttaatgggtccacagcagaggaaaagtgctga

SEQ ID NO: 78 - protein, 585 aa, Glycine max
MKEKMSWTVADAVNYKGFPADRSKTGGWVPAALILGIEIVERLSTMGIAVNLVTYMISIMHLPSSTAANTVTDFMGTSFLLCLLGGFLADSFLGRYKTIGIFASIQTLGTATLAISTKLPGLRPPPCHANSDSCKQANGFQMGILYLSLYLIALGTGGLKSSVSGFGSDQFDEKDEKEKSQMAYFFNRFFFFISFGTLAAVTVLVYLQDEVSRSLAYGICSVSMIIAIIVFLSGTKRYRYKRSLGSPIVHIFQVIAASIKKRKRQLPYNVGSLYEDTPEASRIEHTEQFRFLEKAAIVAEDDFETNLCGSGPNPWKLCSLTRVEEVKMMVRLLPVWATTIIFWTIYAQLITFSVEQASTMERNIGSFQIPAGSVTVFFVAAILITLAVYDRLIMPLWKKWNGKPGFTDLQRIAIGLVFSIFGMAAASVCERKRLSVAKSVSGGNQATTTLPISVFLLIPQFFLVGSGEAFIYTGQLDFFITRSPKGMKTMSTGLFLTTLSLGFFFSSFLVSVVKKVTGTRDGQGWLADSINKGRLDLFYALLTILSFVNFAAFAVCAVWFKPKKPKQPAAMQMGPVNGSTAEEKC

SEQ ID NO: 79 - DNA, 1761 bp, Glycine max
  CDS (1)..(1761)
atgagcaacctccctacaactcaagggaaagccatccctgatgcctccgactacaagggccgccccgccgagcgctctaaaaccggtggctggaccgcttccgccatgatattaggaggagaagtgatggagaggttgacaacactaggcatcgcggtgaatttggtaacatatttgactgggaccatgcatttgggtaatgctgcctctgccaacgttgtaaccaacttcttgggaacctccttcatgctctgtctgctcggtggcttcctcgccgatacttttctcggaagataccgcaccatcgccatcttcgctgccgttcaagcaactggtgtgacaatcttgacaatatcaaccataattccgagccttcaccctccaaagtgcaacggagacaccgtgccaccttgcgtgagagcaaatgagaaacaattaacggtgctttatttggcgctttatgtaacggcgctcggcaccggaggtttgaaatcgagtgtgtccgggttcggttcggatcagttcgatgattcggacgacgacgagaagaagcagatgataaagttcttcaactggttctacttcttcgtgagcatagggtctctggccgcaaccacggttcttgtgtacgtacaagacaacataggacgaggttggggttatggtatctgcgcgggtgcgatcgtggtggcacttctcgtgttcttgtcgggtacgaggaagtaccgtttcaagaaacttgtgggaagtccattaactcagtttgcggaagtgttcgtggctgctctgagaaagaggaacatggaattgccctctgattcatcattgctctttaatgactacgaccccaagaagcagactcttcctcatagcaagcagttccgtttcttggacaaagctgcaatcatggattcatcagaatgcggaggtggaatgaagaggaaatggtatctttgcaccctaacagacgtggaagaagtgaaaatgattctaagaatgctacccatatgggccaccaccatcatgttttggacaatccacgctcaaatgaccacattctcggtgtcacaagcgacaaccatggaccgtcacataggaaaaacatttcaaatgcccgcggcatcaatgaccgttttcttaattggaacaattctcctaactgtccccttctacgaccgtttcattgttcccgtggcaaagaaagtgctcaagaatccacatggtttcacccctttgcaacgcattggagtcggtttagtactctcagtggtttccatggtggtaggagcactgatagaaataaagagactaagatatgcccaatcacatggtttggtagataagccagaagcaaagatccctatgaccgtgttttggttgataccacagaacttgtttgtgggggcaggggaggcatttatgtacatggggcagttggactttttccttagagagtgtcccaaagggatgaaaacaatgagcacgggattgttcttgagcacactctctttggggtttttctttagcaccttgttagtgtctatagtgaacaaaatgacagcacatggtaggccatggctcgcagataatcttaaccaagggaggctctatgacttttactggctcttggctatattgagtgctataaatgtggtcttatacttggtttgtgctaagtggtacgtctacaaggagaagaggcttgctgaagagtgcattgaattggaagaagcagatgctgctgctttccatggccattga

SEQ ID NO: 80 - protein, 586 aa, Glycine max; identical to SEQ ID NO: 30

SEQ ID NO: 81 - DNA, 1758 bp, Glycine max
  CDS (1)..(1758)
atgaaggaaaaaatgagttggacagttgcagacgccgtggactataaaggcttccctgcagacaggtccaaaacaggtggttgggtacccgcagctcttattttagggattgaaatcgtggagaggctctccaccatggggattgcagtgaacctggtaacatacatgatctcaatcatgcatctgccaagctcaactgcagccaacactgtgactgactttatgggcacatcatttctcctgtgtttgctgggaggttttctagcagattccttccttggcagatacaagacaattggaatctttgcttcaatacaaacactgggtactgctacattagcaatctcaacaaaattgccagggctacgtccaccaccttgccatgctaacagtgacagctgcaaacaagccaacggattccaaatgggaatcttgtacttgtcactgtaccttattgcactaggaactggtggcctcaagtccagtgtttcaggatttggttctgaccaattcgatgagaaagatgagaaggagaaatcgcaaatggcctattttttcaacaggtttttcttcttcatcagttttggaactctggcagctgtcacagtacttgtctatctgcaagatgaagtgagtcgcagcttggcgtatggaatatgttctgtctctatgatcatagccattatcgtgttcttatcaggaactaaaagatacagatacaagaggagtttggggagccccattgtccacattttccaagttattgctgcatcaataaagaaaagaaagatgcaactcccatacaatgttggttctttgtatgaggacactcccgaggcttcaagaatagagcacaccgaacagttccgtttcttggagaaagcagccattgtggcagaagatgattttgagacaaatttatgtggttctggaccaaacccatggaaattatgctcactaacaagggtagaggaggtgaaaatgatggtgagacttctgccagtgtgggccacaaccatcatattttggaccatttacgcacagttgatcaccttttcagttgagcaagcctccaccatggaaaggaatattgggagtttccaaatccctgcaggctctgtcacagtcttttttgtggctgcaatactaatcactctggctgtctatgaccgactcatcatgcccctttggaaaaagtggaacggcaaaccaggtttcactgacctacaaaggatagcaattgggcttgtattttccatttttggaatggcggctgcttctgtatgcgagaggaaacggttatccgttgcaaaaagtgttagtggcggcaaccaagcaacaacaacacttcctataagcgttttccttctgatcccacagttcttcttggtgggttctggtgaagcattcatatacacaggccaacttgatttcttcataacacggtcaccaaaaggaatgaaaaccatgagcactggtctctttctcacaactttgtctctcggtttcttcttcagcagtttccttgtctcggttgttaagaaagttactgggacaagagatgggcaagggtggctagcagacagcataaacaagggcaggctcgatttgttctatgcactgcttaccatacttagtttcgttaactttgcagcatttgcggtatgtgcagtttggttcaaacctaagaaacctaaacaaccagctgctatgcaaatggggccagttaatgggtccacagcagaggaaaagtgctga

SEQ ID NO: 82 - protein, 585 aa, Glycine max; identical to SEQ ID NO: 72

SEQ ID NO: 83 - DNA, 1833 bp, Zea mays
  CDS (1)..(1833)
atggtcggactcctccccgagaccaatgccgcggcggagacggacgtcctcctcgacgcctgggacttcaagggccggccggccccgcgcgccaccaccggccgctggggcgccgccgccatgatcctagtggcggagctgaacgagcggctgacgacgctgggcatcgccgtgaacctggtgacgtacctgacgggcaccatgcacctgggcaacgccgagtccgccaacgtcgtcaccaacttcatgggcacctccttcatgctctgcctcctcggcggcttcgtcgccgactccttcctcggccgctacctcaccatcgccatcttcaccgccgtccaggcctcgggcgtgacgatcctgacgatctcgacggcggcgccggggctacggccggcgtcctgctccgcgaccggcgacggaggaggcgtcgtcggggagtgcgcgcgggcgtcgggggcgcagctgggggtgctgtacctggcgctgtacctgacggcgctgggcacgggtgggctaaagtcgagcgtgtcggggttcgggtcggaccagttcgacgagtcggacggcggggagaagcggcagatgatgcgcttcttcaactggttcttcttcttcatctcgctggggtcgctgctggccgtcaccgtgctggtgtacgtccaggacaacctgggcaggcgctggggctacggcgcctgcgcctgcgccatcgccgcgggcctcctcgtcttcctggccggcacacgcaggtaccgcttcaagaagctggccggcagccccctcacgcagatcgccgccgtcgtcgtcgccgcctggcgcaagcgccgcctccctctccccgccgaccccgccatgctctacgacgtcgacgtcggcaaggccgccgccgtcgaggatgggtcctccagcaagaagagcaagcgcaaggagcgcctcccccacaccgaccagttccgcttcctggaccacgcggcgatcaacgaggacccggcggcgggggcgagcagcagcagcaagtggcggctggcgacgctgacggacgtggaggaggtgaagacggtggcgcggatgctgccgatctgggcgaccacgatcatgttctggacggtgtacgcgcagatgaccaccttctcggtgtcgcaggccaccaccatggaccgccgcgtcgggggctcgttccagatccccgcgggctccctcaccgtcttcttcgtcggctccatcctgctcaccgtgcccgtctacgaccgcctcgtggtgcccgtcgcgcgccgcgtcagcggcaacccgcacggcctcaccccgctgcagcggatcgccgtcggcctcgcgctctccgtcgtcgccatggcgggcgccgcgctcacggaggtccgccgcctccgcgtcgcgcgcgagtcctccgagtccgcctccggaggcgtcgtgcccatgtcggtgttctggctcatcccgcagttcttcctcgtgggggcgggcgaggcgttcacgtacatcggccagctcgacttcttcctgcgcgagtgccccaaggggatgaagaccatgagcacggggctgttcctcagcaccctgtcgctgggattcttcgtcagctccgcgctcgtcgccgccgtgcacagggtcacgggcgaccgccacccctggatcgccaacgacctcaacaagggccgcctcgacaacttctactggctgctcgccgccgtctgcctcgccaacctactagtctacctcgtcgccgcccgctggtacaagtacaaggcgggccgccccggcgccgacggcagcgtcaacggcgtcgagatggccgacgagcccacgctccactga

SEQ ID NO: 84 - protein, 610 aa, Zea mays; identical to SEQ ID NO: 34

SEQ ID NO: 85 - DNA, 26 bp, Artificial sequence
  primer
atagagctccttccaaggccgtcccg

SEQ ID NO: 86 - DNA, 31 bp, Artificial sequence
  primer
atacccggggttaagattgaaacacccgtgg

SEQ ID NO: 87 - DNA, 23 bp, Artificial sequence
  primer
atgtctcttcctgaaactaaatc

SEQ ID NO: 88 - DNA, 22 bp, Artificial sequence
  primer
tcaatgacccattggaatactc

SEQ ID NO: 89 - DNA, 26 bp, Artificial sequence
  primer
ataccatggcttccaaggccgtcccg

SEQ ID NO: 90 - DNA, 33 bp, Artificial sequence
  primer
atattaattaagttaagattgaaacacccgtgg

SEQ ID NO: 91 - DNA, 26 bp, Artificial sequence
  primer
ataggtacccttccaaggccgtcccg

SEQ ID NO: 92 - DNA, 31 bp, Artificial sequence
  primer
atagtcgacgttaagattgaaacacccgtgg

SEQ ID NO: 93 - protein, 582 aa, Artificial sequence
  consensus sequence
  Variant (3)..(3): Xaa in position 3 is any amino acid
  Variant (5)..(6): Xaa in position 5 to 6 is any amino acid
  Variant (8)..(8): Xaa in position 8 is any amino acid
  Variant (11)..(12): Xaa in position 11 to 12 is any amino acid
  Variant (14)..(14): Xaa in position 14 is any amino acid
  Variant (19)..(20): Xaa in position 19 to 20 is any amino acid
  Variant (23)..(23): Xaa in position 23 is any amino acid
  Variant (26)..(27): Xaa in position 26 to 27 is any amino acid
  Variant (29)..(30): Xaa in position 29 to 30 is any amino acid
  Variant (33)..(34): Xaa in position 33 to 34 is any amino acid
  Variant (36)..(36): Xaa in position 36 is any amino acid
  Variant (39)..(39): Xaa in position 39 is any amino acid
  Variant (47)..(49): Xaa in position 47 to 49 is any amino acid
  Variant (53)..(57): Xaa in position 53 to 57 is any amino acid
  Variant (60)..(60): Xaa in position 60 is any amino acid
  Variant (63)..(63): Xaa in position 63 is any amino acid
  Variant (65)..(65): Xaa in position 65 is any amino acid
  Variant (70)..(70): Xaa in position 70 is any amino acid
  Variant (72)..(72): Xaa in position 72 is any amino acid
  Variant (78)..(78): Xaa in position 78 is any amino acid
  Variant (81)..(82): Xaa in position 81 to 82 is any amino acid
  Variant (87)..(87): Xaa in position 87 is any amino acid
  Variant (90)..(90): Xaa in position 90 is any amino acid
  Variant (93)..(95): Xaa in position 93 to 95 is any amino acid
  Variant (98)..(98): Xaa in position 98 is any amino acid
  Variant (100)..(102): Xaa in position 100 to 102 is any amino acid
  Variant (104)..(106): Xaa in position 104 to 106 is any amino acid
  Variant (108)..(109): Xaa in position 108 to 109 is any amino acid
  Variant (111)..(112): Xaa in position 111 to 112 is any amino acid
  Variant (116)..(116): Xaa in position 116 is any amino acid
  Variant (118)..(120): Xaa in position 118 to 120 is any amino acid
  Variant (121)..(131): Xaa in position 121 to 131 is any or no amino acid
  Variant (133)..(134): Xaa in position 133 to 134 is any amino acid
  Variant (136)..(138): Xaa in position 136 to 138 is any amino acid
  Variant (140)..(142): Xaa in position 140 to 142 is any amino acid
  Variant (145)..(146): Xaa in position 145 to 146 is any amino acid
  Variant (149)..(150): Xaa in position 149 to 150 is any amino acid
  Variant (157)..(157): Xaa in position 157 is any amino acid
  Variant (159)..(159): Xaa in position 159 is any amino acid
  Variant (171)..(172): Xaa in position 171 to 172 is any amino acid
  Variant (174)..(175): Xaa in position 174 to 175 is any amino acid
  Variant (176)..(176): Xaa in position 176 is any or no amino acid
  Variant (178)..(180): Xaa in position 178 to 180 is any amino acid
  Variant (182)..(183): Xaa in position 182 to 183 is any amino acid
  Variant (187)..(187): Xaa in position 187 is any amino acid
  Variant (189)..(189): Xaa in position 189 is any amino acid
  Variant (191)..(194): Xaa in position 191 to 194 is any amino acid
  Variant (196)..(196): Xaa in position 196 is any amino acid
  Variant (198)..(198): Xaa in position 198 is any amino acid
  Variant (206)..(206): Xaa in position 206 is any amino acid
  Variant (209)..(210): Xaa in position 209 to 210 is any amino acid
  Variant (213)..(213): Xaa in position 213 is any amino acid
  Variant (215)..(215): Xaa in position 215 is any amino acid
  Variant (218)..(218): Xaa in position 218 is any amino acid
  Variant (220)..(229): Xaa in position 220 to 229 is any amino acid
  Variant (232)..(232): Xaa in position 232 is any amino acid
  Variant (235)..(236): Xaa in position 235 to 236 is any amino acid
  Variant (239)..(239): Xaa in position 239 is any amino acid
  Variant (241)..(243): Xaa in position 241 to 243 is any amino acid
  Variant (247)..(252): Xaa in position 247 to 252 is any amino acid
  Variant (254)..(255): Xaa in position 254 to 255 is any amino acid
  Variant (258)..(259): Xaa in position 258 to 259 is any amino acid
  Variant (262)..(264): Xaa in position 262 to 264 is any amino acid
  Variant (265)..(265): Xaa in position 265 is any or no amino acid
  Variant (268)..(272): Xaa in position 268 to 272 is any amino acid
  Variant (274)..(282): Xaa in position 274 to 282 is any amino acid
  Variant (283)..(302): Xaa in position 283 to 302 is any or no amino acid
  Variant (304)..(309): Xaa in position 304 to 309 is any amino acid
  Variant (312)..(312): Xaa in position 312 is any amino acid
  Variant (316)..(325): Xaa in position 316 to 325 is any amino acid
  Variant (326)..(335): Xaa in position 326 to 335 is any or no amino acid
  Variant (337)..(337): Xaa in position 337 is any amino acid
  Variant (339)..(341): Xaa in position 339 to 341 is any amino acid
  Variant (343)..(343): Xaa in position 343 is any amino acid
  Variant (349)..(351): Xaa in position 349 to 351 is any amino acid
  Variant (353)..(353): Xaa in position 353 is any amino acid
  Variant (356)..(356): Xaa in position 356 is any amino acid
  Variant (360)..(360): Xaa in position 360 is any amino acid
  Variant (362)..(362): Xaa in position 362 is any amino acid
  Variant (366)..(367): Xaa in position 366 to 367 is any amino acid
  Variant (370)..(371): Xaa in position 370 to 371 is any amino acid
  Variant (376)..(376): Xaa in position 376 is any amino acid
  Variant (379)..(380): Xaa in position 379 to 380 is any amino acid
  Variant (382)..(382): Xaa in position 382 is any amino acid
  Variant (384)..(387): Xaa in position 384 to 387 is any amino acid
  Variant (388)..(395): Xaa in position 388 to 395 is any or no amino acid
  Variant (397)..(398): Xaa in position 397 to 398 is any amino acid
  Variant (400)..(401): Xaa in position 400 to 401 is any amino acid
  Variant (403)..(404): Xaa in position 403 to 404 is any amino acid
  Variant (407)..(410): Xaa in position 407 to 410 is any amino acid
  Variant (413)..(413): Xaa in position 413 is any amino acid
  Variant (415)..(417): Xaa in position 415 to 417 is any amino acid
  Variant (421)..(423): Xaa in position 421 to 423 is any amino acid
  Variant (425)..(432): Xaa in position 425 to 432 is any amino acid
  Variant (433)..(434): Xaa in position 433 to 434 is any or no amino acid
  Variant (436)..(436): Xaa in position 436 is any amino acid
  Variant (438)..(440): Xaa in position 438 to 440 is any amino acid
  Variant (445)..(446): Xaa in position 445 to 446 is any amino acid
  Variant (449)..(454): Xaa in position 449 to 454 is any amino acid
  Variant (456)..(458): Xaa in position 456 to 458 is any amino acid
  Variant (460)..(461): Xaa in position 460 to 461 is any amino acid
  Variant (463)..(464): Xaa in position 463 to 464 is any amino acid
  Variant (466)..(468): Xaa in position 466 to 468 is any amino acid
  Variant (470)..(478): Xaa in position 470 to 478 is any amino acid
  Variant (479)..(486): Xaa in position 479 to 486 is any or no amino acid
  Variant (488)..(488): Xaa in position 488 is any amino acid
  Variant (490)..(490): Xaa in position 490 is any amino acid
  Variant (493)..(495): Xaa in position 493 to 495 is any amino acid
  Variant (498)..(498): Xaa in position 498 is any amino acid
  Variant (503)..(503): Xaa in position 503 is any amino acid
  Variant (505)..(505): Xaa in position 505 is any amino acid
  Variant (512)..(515): Xaa in position 512 to 515 is any amino acid
  Variant (521)..(521): Xaa in position 521 is any amino acid
  Variant (529)..(529): Xaa in position 529 is any amino acid
  Variant (532)..(533): Xaa in position 532 to 533 is any amino acid
  Variant (537)..(537): Xaa in position 537 is any amino acid
  Variant (540)..(540): Xaa in position 540 is any amino acid
  Variant (543)..(544): Xaa in position 543 to 544 is any amino acid
  Variant (546)..(548): Xaa in position 546 to 548 is any amino acid
  Variant (550)..(550): Xaa in position 550 is any amino acid
  Variant (551)..(557): Xaa in position 551 to 557 is any or no amino acid
  Variant (559)..(565): Xaa in position 559 to 565 is any amino acid
  Variant (569)..(570): Xaa in position 569 to 570 is any amino acid
  Variant (576)..(581): Xaa in position 576 to 581 is any amino acid
DAXDXXGXPAXXSXTGGWXXAAXILXXEXXERXXTXGIXVNLVTYLXXXMHLXXXXXANXVTXFXGTSFXLXLLGGFXADXXLGRYXTIXIFXXXQAXGXXXLXXXTXXPXXRPPXCXXXXXXXXXXXXXXCXXAXXXQXXXLYXXLYXXALGTGGXKXSVSGFGSDQFDXXDXXXEXXXMXXFFNXFXFXXXXGXLXAVTVLVYXQDXXGRXWXYGXCXXXXXXXXXXFLXGTXXYRXKXXXGSPXXXXXXVXXAAXXKRXXXXLPXXXXXLXXXXXXXXXXXXXXXXXXXXXXXXXXXXXHXXXXXXLDXAAIXXXXXXXXXXXXXXXXXXXXWXLXXXTXVEEVKXXXRXLPXWATXIXFWTXXAQXXTFSVXQAXXMXRXXXXXXXXXXXXFXXPXXSXXVFXXXXILXTXXXYDRXXXPXXXXXXXXXXPXGXXXLQRIXXGLXXXXXXMXXXAXXEXXRXXXAXXXXXXXXXXXXXXXXXFXLXPQXXXVGXGEAFXYXGQLDFFXXXXPKGMKXMSTGLFLXTLXXGFFXSSXLVXXVXXXTXXXXXXXXWXXXXXXXGRLXXFYWLLXXXXXXN

SEQ ID NO: 94 - protein, 44 aa, Artificial sequence
  protein pattern
  Variant (2)..(4): Xaa in position 2 to 4 is any amino acid
  Variant (6)..(7): Xaa in position 6 to 7 is any amino acid
  Variant (10)..(10): Xaa in position 10 is Asp or Asn
  Variant (11)..(11): Xaa in position 11 is any amino acid
  Variant (13)..(13): Xaa in position 13 is any or no amino acid
  Variant (16)..(18): Xaa in position 16 to 18 is any amino acid
  Variant (19)..(19): Xaa in position 19 is any or no amino acid
  Variant (21)..(21): Xaa in position 21 is Ala, Ser or Thr
  Variant (23)..(23): Xaa in position 23 is any amino acid
  Variant (25)..(25): Xaa in position 25 is Thr or Val
  Variant (31)..(31): Xaa in position 31 is Ile, Leu, Met or Val
  Variant (34)..(34): Xaa in position 34 is any amino acid
  Variant (35)..(35): Xaa in position 35 is Ile, Leu or Val
  Variant (36)..(36): Xaa in position 36 is Gly or Ser
  Variant (38)..(39): Xaa in position 38 to 39 is any amino acid
  Variant (40)..(40): Xaa in position 40 is Ala or Gly
  Variant (43)..(43): Xaa in position 43 is Ala, Ile or Leu
EXXXMXXFFXXFXFFXXXXGXLXAXTVLVYXQDXXXRXXXYGXC

SEQ ID NO: 95 - protein, 61 aa, Artificial sequence
  protein pattern
  Variant (3)..(3): Xaa in position 3 is Leu or Met
  Variant (4)..(4): Xaa in position 4 is Ser or Thr
  Variant (6)..(6): Xaa in position 6 is Leu or Met
  Variant (9)..(9): Xaa in position 9 is Ala or Gly
  Variant (14)..(14): Xaa in position 14 is Pro or Thr
  Variant (16)..(16): Xaa in position 16 is Leu or Met
  Variant (17)..(17): Xaa in position 17 is any amino acid
  Variant (18)..(18): Xaa in position 18 is Ala, Glu, Gly or Ser
  Variant (19)..(19): Xaa in position 19 is any amino acid
  Variant (22)..(22): Xaa in position 22 is Ala or Leu
  Variant (23)..(23): Xaa in position 23 is Gly or Pro
  Variant (24)..(24): Xaa in position 24 is Asn or Ser
  Variant (25)..(25): Xaa in position 25 is Ala or Ser
  Variant (26)..(26): Xaa in position 26 is Ala, Glu, Ser or Thr
  Variant (27)..(27): Xaa in position 27 is Ala or Ser
  Variant (30)..(30): Xaa in position 30 is any or no amino acid
  Variant (32)..(32): Xaa in position 32 is any or no amino acid
  Variant (34)..(34): Xaa in position 34 is Asp or Asn
  Variant (36)..(36): Xaa in position 36 is Ile, Leu or Met
  Variant (41)..(41): Xaa in position 41 is Leu or Met
  Variant (43)..(43): Xaa in position 43 is Cys or Thr
  Variant (45)..(45): Xaa in position 45 is Phe or Leu
  Variant (49)..(49): Xaa in position 49 is Ile, Leu or Val
  Variant (51)..(51): Xaa in position 51 is Asp or His
  Variant (52)..(52): Xaa in position 52 is Ser or Thr
  Variant (53)..(53): Xaa in position 53 is Phe or Tyr
  Variant (57)..(57): Xaa in position 57 is Phe or Tyr
  Variant (58)..(58): Xaa in position 58 is any amino acid
  Variant (61)..(61): Xaa in position 61 is Ala or Gly
ERXXTXGIXVNLVXYXXXXMHXXXXXXANXVXTXFXGTSFXLXLXGGFXAXXXLGRXXTIX

SEQ ID NO: 96 - protein, 47 aa, Artificial sequence
  protein pattern
  Variant (2)..(2): Xaa in position 2 is any amino acid
  Variant (4)..(4): Xaa in position 4 is Ala, Cys or Ser
  Variant (5)..(5): Xaa in position 5 is Ser or Thr
  Variant (6)..(6): Xaa in position 6 is any amino acid
  Variant (7)..(7): Xaa in position 7 is Ser or Thr
  Variant (8)..(8): Xaa in position 8 is Asp, Lys or Arg
  Variant (9)..(9): Xaa in position 9 is Ile or Val
  Variant (14)..(14): Xaa in position 14 is any amino acid
  Variant (15)..(15): Xaa in position 15 is Ile, Leu, Met or Val
  Variant (16)..(16): Xaa in position 16 is Ala, Ile, Leu or Val
  Variant (18)..(18): Xaa in position 18 is any or no amino acid
  Variant (20)..(20): Xaa in position 20 is any or no amino acid
  Variant (22)..(22): Xaa in position 22 is any amino acid
  Variant (26)..(26): Xaa in position 26 is Cys or Thr
  Variant (28)..(28): Xaa in position 28 is Ile, Leu or Met
  Variant (32)..(32): Xaa in position 32 is any amino acid
  Variant (33)..(33): Xaa in position 33 is His or Tyr
  Variant (36)..(36): Xaa in position 36 is Leu or Met
  Variant (37)..(37): Xaa in position 37 is any amino acid
  Variant (39)..(39): Xaa in position 39 is Phe or Leu
  Variant (40)..(40): Xaa in position 40 is Ala or Ser
  Variant (42)..(42): Xaa in position 42 is Ala, Glu or Ser
  Variant (44)..(44): Xaa in position 44 is Ala or Ser
  Variant (45)..(45): Xaa in position 45 is Glu, Ser or Thr
  Variant (46)..(46): Xaa in position 46 is any amino acid
  Variant (47)..(47): Xaa in position 47 is Leu or Met
WXLXXXXXXEEVKXXXRXLXPXWATXIXFWTXXAQXXTXXVXQXXXX

SEQ ID NO: 97 - protein, 42 aa, Artificial sequence
  protein pattern
  Variant (2)..(3): Xaa in position 2 to 3 is any amino acid
  Variant (4)..(4): Xaa in position 4 is Ala or Pro
  Variant (5)..(5): Xaa in position 5 is Asp, Asn, Ser or Thr
  Variant (6)..(6): Xaa in position 6 is Ala, Glu, Gly or Ser
  Variant (7)..(7): Xaa in position 7 is any amino acid
  Variant (9)..(9): Xaa in position 9 is Leu or Met
  Variant (10)..(10): Xaa in position 10 is any amino acid
  Variant (11)..(11): Xaa in position 11 is Ile, Leu or Val
  Variant (14)..(15): Xaa in position 14 to 15 is any or no amino acid
  Variant (17)..(18): Xaa in position 17 to 18 is any or no amino acid
  Variant (20)..(21): Xaa in position 20 to 21 is any amino acid
  Variant (25)..(25): Xaa in position 25 is Gly or Thr
  Variant (28)..(28): Xaa in position 28 is Ile, Leu or Val
  Variant (30)..(30): Xaa in position 30 is Ala or Ser
  Variant (31)..(31): Xaa in position 31 is Asn or Ser
  Variant (32)..(32): Xaa in position 32 is Ile or Val
  Variant (37)..(37): Xaa in position 37 is Ser or Thr
  Variant (42)..(42): Xaa in position 42 is Asp, Glu or Thr
CXXXXXXQXXXLYXXLXXYXXALGXGGXKXXXSGFGXDQFDX

SEQ ID NO: 98 - protein, 40 aa, Artificial sequence
  protein pattern
  Variant (3)..(3): Xaa in position 3 is any amino acid
  Variant (6)..(6): Xaa in position 6 is any or no amino acid
  Variant (8)..(8): Xaa in position 8 is any or no amino acid
  Variant (11)..(11): Xaa in position 11 is Phe or Tyr
  Variant (13)..(13): Xaa in position 13 is Lys or Arg
  Variant (14)..(15): Xaa in position 14 to 15 is any amino acid
  Variant (19)..(19): Xaa in position 19 is Ile, Leu, Met or Val
  Variant (20)..(20): Xaa in position 20 is Thr or Val
  Variant (21)..(21): Xaa in position 21 is any amino acid
  Variant (22)..(22): Xaa in position 22 is Phe, Ile or Val
  Variant (23)..(23): Xaa in position 23 is any amino acid
  Variant (24)..(24): Xaa in position 24 is Ala, Glu, Gln, Ser or Thr
  Variant (26)..(26): Xaa in position 26 is any amino acid
  Variant (27)..(27): Xaa in position 27 is Ala or Val
  Variant (29)..(29): Xaa in position 29 is Ala or Ser
  Variant (30)..(32): Xaa in position 30 to 32 is any amino acid
  Variant (34)..(39): Xaa in position 34 to 39 is any amino acid
  Variant (40)..(40): Xaa in position 40 is Asp, Asn, Pro or Ser
FLXGTXRXYRXKXXXGSPXXXXXXVXXAXXXXRXXXXXXX

SEQ ID NO: 99 - protein, 32 aa, Artificial sequence
  protein pattern
  Variant (2)..(4): Xaa in position 2 to 4 is any amino acid
  Variant (5)..(8): Xaa in position 5 to 8 is any or no amino acid
  Variant (11)..(12): Xaa in position 11 to 12 is any amino acid
  Variant (16)..(16): Xaa in position 16 is Leu or Met
  Variant (17)..(17): Xaa in position 17 is Leu or Val
  Variant (18)..(18): Xaa in position 18 is Ala or Val
  Variant (19)..(19): Xaa in position 19 is any amino acid
  Variant (20)..(20): Xaa in position 20 is Ile, Leu or Val
  Variant (21)..(21): Xaa in position 21 is Cys, Gly, Ser or Val
  Variant (22)..(22): Xaa in position 22 is Ala, Gly, Leu or Val
  Variant (23)..(23): Xaa in position 23 is Ala, Ile or Leu
  Variant (25)..(25): Xaa in position 25 is Phe, Leu or Val
  Variant (26)..(27): Xaa in position 26 to 27 is any amino acid
  Variant (28)..(28): Xaa in position 28 is Phe or Tyr
  Variant (29)..(31): Xaa in position 29 to 31 is any amino acid
  Variant (32)..(32): Xaa in position 32 is Ala or Ser
LXXXXXXXRLXXFYWXXXXXXXXNXXXXXXXX

SEQ ID NO: 100 - protein, 31 aa, Artificial sequence
  protein pattern
  Variant (3)..(3): Xaa in position 3 is any amino acid
  Variant (4)..(4): Xaa in position 4 is Asp or Asn
  Variant (5)..(5): Xaa in position 5 is Phe or Tyr
  Variant (6)..(6): Xaa in position 6 is any amino acid
  Variant (8)..(8): Xaa in position 8 is any amino acid
  Variant (11)..(11): Xaa in position 11 is any amino acid
  Variant (12)..(12): Xaa in position 12 is Lys or Arg
  Variant (13)..(13): Xaa in position 13 is Ala or Ser
  Variant (14)..(14): Xaa in position 14 is any amino acid
  Variant (15)..(15): Xaa in position 15 is Ser or Thr
  Variant (17)..(18): Xaa in position 17 to 18 is any or no amino acid
  Variant (20)..(21): Xaa in position 20 to 21 is any amino acid
  Variant (22)..(23): Xaa in position 22 to 23 is any or no amino acid
  Variant (25)..(25): Xaa in position 25 is Leu or Met
  Variant (26)..(26): Xaa in position 26 is Ile or Val
  Variant (28)..(28): Xaa in position 28 is Cys, Gly or Val
  Variant (29)..(29): Xaa in position 29 is Ala, Gly, Ile or Val
  Variant (31)..(31): Xaa in position 31 is Ala, Ile, Leu or Val
DAXXXXGXPAXXXXXGXXGXXXXAXXLXXEX

SEQ ID NO: 101 - protein, 28 aa, Artificial sequence
  protein pattern
  Variant (2)..(4): Xaa in position 2 to 4 is any or no amino acid
  Variant (7)..(7): Xaa in position 7 is Ile or Val
  Variant (8)..(9): Xaa in position 8 to 9 is any amino acid
  Variant (12)..(12): Xaa in position 12 is any amino acid
  Variant (13)..(13): Xaa in position 13 is Phe or Leu
  Variant (14)..(14): Xaa in position 14 is Ala, Gly or Ser
  Variant (15)..(16): Xaa in position 15 to 16 is any amino acid
  Variant (17)..(17): Xaa in position 17 is Ala, Gly or Ser
  Variant (19)..(19): Xaa in position 19 is Ala, Ile or Val
  Variant (20)..(20): Xaa in position 20 is Ala, Cys, Gly, Thr or Val
  Variant (21)..(21): Xaa in position 21 is Ala, Gly or Ser
  Variant (23)..(23): Xaa in position 23 is Ala, Leu or Val
  Variant (24)..(24): Xaa in position 24 is any amino acid
  Variant (26)..(27): Xaa in position 26 to 27 is any amino acid
LXXXQRXXXGLXXXXXXMXXXAXXEXXR

SEQ ID NO: 102 - protein, 28 aa, Artificial sequence
  protein pattern
  Variant (2)..(2): Xaa in position 2 is any amino acid
  Variant (3)..(3): Xaa in position 3 is any or no amino acid
  Variant (5)..(5): Xaa in position 5 is any amino acid
  Variant (6)..(9): Xaa in position 6 to 9 is any or no amino acid
  Variant (11)..(11): Xaa in position 11 is Thr or Val
  Variant (12)..(13): Xaa in position 12 to 13 is any amino acid
  Variant (15)..(15): Xaa in position 15 is Ala or Thr
  Variant (16)..(16): Xaa in position 16 is Ile, Leu or Val
  Variant (17)..(17): Xaa in position 17 is Ala, Asp or Ser
  Variant (19)..(19): Xaa in position 19 is any amino acid
  Variant (20)..(20): Xaa in position 20 is Ala, Ile, Leu or Val
  Variant (22)..(22): Xaa in position 22 is Glu, Gly or Ser
  Variant (23)..(23): Xaa in position 23 is Phe, Leu or Met
  Variant (24)..(24): Xaa in position 24 is any amino acid
  Variant (26)..(26): Xaa in position 26 is Ala or Pro
  Variant (27)..(27): Xaa in position 27 is any amino acid
IXXAXXXXXGXXXLXXXTXXPXXXPXXC

SEQ ID NO: 103 - protein, 13 aa, Artificial sequence
  protein pattern
  Variant (2)..(2): Xaa in position 2 is Ser or Thr
  Variant (3)..(3): Xaa in position 3 is any amino acid
  Variant (4)..(4): Xaa in position 4 is Glu, Gln or Arg
  Variant (5)..(5): Xaa in position 5 is any amino acid
  Variant (6)..(6): Xaa in position 6 is His or Arg
  Variant (7)..(7): Xaa in position 7 is any amino acid
  Variant (9)..(9): Xaa in position 9 is Asp or Glu
  Variant (10)..(10): Xaa in position 10 is His or Lys
HXXXXXXLXXAAI

SEQ ID NO: 104 - DNA, 1110 bp, Arabidopsis thaliana
  CDS (1)..(1110)
atggcgtcttcggtttttctatccagtttctcgtcatcgtcttctttgcaactctgctcttcctttcacggcgagtacttagctccgtcgagatgctttctcggagctccggtcacttcctcttctttatcactctccggtaagaagaactcatattctccgagacagttccatgtttctgccaagaaagtttctgggttagaggaagccattagaatcagaaaaatgagagagcttgaaactaaatcaaaagttaggagaaatccaccattaagacgtggaagagtatcgcctcgtcttcttgtacctgatcacattccaaggcctccttatgttgagtctggtgtattaccggatatatcaagtgagttccagattcctggtcctgaaggcattgcgaaaatgagagctgcttgcgagcttgctgctcgggttttaaactatgctggaactttggttaagccatctgttacgactaatgaaatcgataaagctgtgcatgatatgattattgaagctggtgcttatccttcacctcttggatatggtggatttcctaaaagtgtgtgtacttcagttaatgagtgtatgtgtcacggaataccagattctcgccagctacagagcggggatataatcaacatcgatgtcacggtttacttggatggttaccatggagatacgtcgagaactttcttctgtggagaagttgacgaaggtttcaaacgacttgtgaaggttacggaagaatgtttggagagaggtattgcagtttgtaaagacggagcaagcttcaagaaaatcgggaaaagaatcagtgagcatgcggaaaagttcggctacaacgttgtggagcggtttgttgggcatggtgttggaccagtattccactccgaacctcttatatatcattaccgaaatgatgagcctggactaatggttgagggacagacattcacaattgaaccgattctcacgattggaaccacagaatgtgtaacatggccagacaactggactactctgacagcagatggtggcgtcgctgctcagtttgagcataccattctgattactagaactggttcagagattcttaccaaatgctaa

SEQ ID NO: 105 - protein, 369 aa, Arabidopsis thaliana
MASSVFLSSFSSSSSLQLCSSFHGEYLAPSRCFLGAPVTSSSLSLSGKKNSYSPRQFHVSAKKVSGLEEAIRIRKMRELETKSKVRRNPPLRRGRVSPRLLVPDHIPRPPYVESGVLPDISSEFQIPGPEGIAKMRAACELAARVLNYAGTLVKPSVTTNEIDKAVHDMIIEAGAYPSPLGYGGFPKSVCTSVNECMCHGIPDSRQLQSGDIINIDVTVYLDGYHGDTSRTFFCGEVDEGFKRLVKVTEECLERGIAVCKDGASFKKIGKRISEHAEKFGYNVVERFVGHGVGPVFHSEPLIYHYRNDEPGLMVEGQTFTIEPILTIGTTECVTWPDNWTTLTADGGVAAQFEHTILITRTGSEILTKC

SEQ ID NO: 106 - DNA, 1116 bp, Brassica napus
  CDS (1)..(1116)
atggcgtctacagtctttctatccagtttctcgccatcgtcgtcgttgcaactccgttcttctttcaacggcgagtacgtatcctcctcgaggagcttcatcggagcagctccgttcgcttcctcttctctatcgctgctctccggtcagaagaactcatatcctcagagaaaactccacgtgtccgccaagaaagtttctggattagaggaagccattagaatcagaaggatgagagagcttgagaaaacttcaaaagttaggagaaacccaccgttacgacgtggaagagtctcccctcgtctcctcgtccctgaccacataccaaggcctccttacgttgagtctggcgtgttacctgatatatctcctgagttccagattcctggtcctgaaggcattgtgaagatgagagctgcttgcgagctcgctgctcgggttctaaactttgcaggaactttggttaaaccatctgtgacgactaatgaaatagacaaagcggtgcatgatatgattgttgaagctggtgcttatccttcgcctcttgggtatggtgggttccctaaaagtgtgtgtacgtcagtgaacgagtgtatgtgtcatgggataccagattctcgacagctgcagagtggggatataataaacatcgatgtcacagtttacttggatggttaccatggagatacatcaagaactttcttctgtggagaagtagatgaaggttttaaacgacttgtaaaggttacggaggaatgcttggagagaggtatagccgtttgcaaagatggagcaagcttcaagaaaatcggcaagagaataagcgagcatgctgaaaagaacggctacaacgtggtggagcgctttgttgggcatggtgttggaccagtgttccactcagaacccttgatttatcattaccgaaatgatgggcctgggcaaatggttgagggacaaacattcacaattgaaccgattctgacgattggaaccacggaatgtgtaacatggccagacaactggactactctaacagctgatggtggggtagccgcacagtgtgaacatacaattctgataactagaactggtgcagagattcttaccaaatgctga

SEQ ID NO: 107 - protein, 371 aa, Brassica napus
MASTVFLSSFSPSSSLQLRSSFNGEYVSSSRSFIGAAPFASSSLSLLSGQKNSYPQRKLHVSAKKVSGLEEAIRIRRMRELEKTSKVRRNPPLRRGRVSPRLLVPDHIPRPPYVESGVLPDISPEFQIPGPEGIVKMRAACELAARVLNFAGTLVKPSVTTNEIDKAVHDMIVEAGAYPSPLGYGGFPKSVCTSVNECMCHGIPDSRQLQSGDIINIDVTVYLDGYHGDTSRTFFCGEVDEGFKRLVKVTEECLERGIAVCKDGASFKKIGKRISEHAEKNGYNVVERFVGHGVGPVFHSEPLIYHYRNDGPGQMVEGQTFTIEPILTIGTTECVTWPDNWTTLTADGGVAAQCEHTILITRTGAEILTKC

SEQ ID NO: 108 - DNA, 1306 bp, oryza sativa
  CDS (41)..(1081)
  misc_feature (11)..(11): n is a, g, c or t
acacacgcatnagggagtcccttccgctcagctcgcccccatggcgacctcgtcgtcgccgcgcctgctctcctccttcctcggcgaccgcctcctctccgccagcgccaggccgctcctccgcggggccgctccaggaagcaggcgggccgcgtatcaggcgacgagaacgctctgcaacctggtggatatcctcttcaacagaggtcagagtgacaaaccggaagataaccctagacgcctacggcctgggaaagtatctcctcgtctaagcgttcccaaacatatacagcggccaccatatgtcaatgctcgtcaaagacctggattgcacaatggacctgaaatacatgatgagagagggatcgaatgcatgagggcttctggaaagcttgctgcacaagttttgaagtttgccgggactcttgtagagccaggcataacaactgatgagattgataaagcggtgcaccaaatgatagtagataatggagcatacccttcgccacttggttattgcggttttccaaagagtgtctgcacctcagtgaatgagtgcatctgtcatggtatacctgattctcgtcctcttgaagatggtgacattatcaacattgatgttactgtttatctcaatggttaccacggtgatacatctgctacatttctatgtggtaatgttgatgacaaagctaagaaattagttcaggtaacaagagaatgtctcgacaaggctatatcaatctgcgcccctggggtggagatcaaacgtattggtcgaactatacaggaccatgcagataaattcaagtttggtgtagttcgacagttcgtcggtcatggggttggacaagtgtttcatgctgaacctgtggtgcttcatttccgaaacaatgaatggggccgtatgacattgaaccaaacatttactatagagcccatgctaaccgtggggagcgtaaatccagttatatggtccgatgactggacagcggtgactgaagacggcagcttgtcagcacagtttgagcacacaatactgattacagaggatggcgcggagatactgacgcagtgttaagggcggacgaggattagaggcgagtaatgacagtgattctatttctataagtggctggctggagatggaatcctacatttttttggacaaatgatccaacttgaagttccaaaccctaatgtaaactcatattactaagataacctacaaaattttcgacgtaaaattggttttagaagtcaaaaaaaaaaaaaaaaaactcgagactagttctctccctcgtgc

SEQ ID NO: 109 - protein, 346 aa, oryza sativa
MATSSSPRLLSSFLGDRLLSASARPLLRGAAPGSRRAAYQATRTLCNLVDILFNRGQSDKPEDNPRRLRPGKVSPRLSVPKHIQRPPYVNARQRPGLHNGPEIHDERGIECMRASGKLAAQVLKFAGTLVEPGITTDEIDKAVHQMIVDNGAYPSPLGYCGFPKSVCTSVNECICHGIPDSRPLEDGDIINIDVTVYLNGYHGDTSATFLCGNVDDKAKKLVQVTRECLDKAISICAPGVEIKRIGRTIQDHADKFKFGVVRQFVGHGVGQVFHAEPVVLHFRNNEWGRMTLNQTFTIEPMLTVGSVNPVIWSDDWTAVTEDGSLSAQFEHTILITEDGAEILTQC

SEQ ID NO: 110 - DNA, 1261 bp, Oryza sativa
  CDS (86)..(1108)
agccttcccgtgttatcctcttcaacctctggccctctcactcctcgcgccgcgcggctgctccggccaccaaagtggcgctccgatggcggtgagagtcccttccatggagctgcaccgccccccgccgtccgtatccggtgtccgaggaaaaagctgccttcaaaagcctttccttgtccaagcaaagagattagagggattggagaaggcaaacccaaggtcacgaggaaagcaaagtttggaacaagtgaagaaaagagcaccactgatccgtgggacagtgagtccacctctaccagtaccaggtcacataactcaacctccttacgttggtaaaaaggatgcttcagagatagcaagtgagatacaaatgcatgacaaagtgagcattattcacatgaaagctgcatgtgagcttgctgctcgtgttcttgaatacgctggaactttagtgaaaccctctgtaacaacagacgaaattgataaagcagtgcacaagatgatcattgatgctggagcctatccatcccctctcggatacggagggtttccaaaaagcgtgtgcacatctgtgaatgaatgcatctgccatggaattcctgattctcgtgaacttcaggatggagacataattaatatcgacgtcactgtctacctgaatggctatcatggggacacctcaaagactttcctatgtggagaagtggatgaagccagtaaacgacttgtgaaggttactgaagagtgcatgctcagggctatatcagcttgcaaacatggtaccagcttgaagaaaattggcagaagaataagcgagcatgctgagaggcacggatttggtgttgtggatcgttttgttgggcatggagttgggagaatatttcattcagaaccaatgatatatcaccagcgtaataatatgccaggtcaaatggttgaaggccagacattcacaatagaaccggccctatccatgggaagcattgattgcgacatgtgggacgacggctggacggccgtcacgacggacggcagcctagccgcgcagttcgagcacacgatactgattaccaagacaggagcagaaatcctcacgaaatgctagtaagatcggtgcccagcattagccactggagtagcagtgatctctgtgtttgtaggacgagtatggtggaaaggatggtcgattgttttgctgtataaagtactccctctgtattttaattttgattttaatgtattatgccgttgacttttt

SEQ ID NO: 111 - protein, 340 aa, Oryza sativa
MAVRVPSMELHRPPPSVSGVRGKSCLQKPFLVQAKRLEGLEKANPRSRGKQSLEQVKKRAPLIRGTVSPPLPVPGHITQPPYVGKKDASEIASEIQMHDKVSIIHMKAACELAARVLEYAGTLVKPSVTTDEIDKAVHKMIIDAGAYPSPLGYGGFPKSVCTSVNECICHGIPDSRELQDGDIINIDVTVYLNGYHGDTSKTFLCGEVDEASKRLVKVTEECMLRAISACKHGTSLKKIGRRISEHAERHGFGVVDRFVGHGVGRIFHSEPMIYHQRNNMPGQMVEGQTFTIEPALSMGSIDCDMWDDGWTAVTTDGSLAAQFEHTILITKTGAEILTKC

SEQ ID NO: 112 - DNA, 1354 bp, Oryza sativa
  CDS (62)..(1174)
gccctcgccccaagccacacacacacgcagtcagggagtcccttccgctcagctcgcccccatggcgacctcgtcgtcgccgcgcctgctctcctccttcctcggcgaccgcctcctctccgccagcgccaggccgctcctccgcggggccgctccaggaagcaggcgggccgcgtatcaggcgacgagaacgctctgcaacctggtggatatcctcttcaacagaggtcagagtgacaaaccggaagataaccctagacgcctacggcctgggaaagtatctcctcgtctaagcgttcccaaacatatacagcggccaccatatgtcaatgctcgtcaaagacctggattgcacaatggacctgaaatacatgatgagagagggatcgaatgcatgagggcttctggaaagcttgctgcacaagttttgaagtttgccgggactcttgtagagccaggcataacaactgatgagattgataaagcggtgcaccaaatgatagtagataatggagcatacccttcgccacttggttattgcggttttccaaggagtgtctgcacctcagtgaatgagtgcatctgtcatggtatacctgattctcgtcctcttgaagatggtgacattatcaacattgatgttactgtttatctcaatagagtgtttctatgcatctcctccttatatttgcataaatgtcaaagtatgacaatggtggctggacagctgggttaccacggtgatacatctgctacatttctatgtggtaatgttgatgacaaagctaagaaattagttcaggtaacaagagaatgtctcgacaaggctatatcaatctgcgcccctggggtggagatcaaacgtattggtcgaactatacaggaccatgcagataaattcaagtttggtgtagttcgacagttcgtcggtcatggggttggacaagtgtttcatgctgaacctgtggtgcttcatttccgaaacaatgaatggggccgtatgacattgaaccaaacatttactatagagcccatgctaaccgtggggagcgtaaatccagttatatggtccgatgactggacagcggtgactgaagacggcagcttgtcagcacagtttgagcacacaatactgattacagaggatggcgcggagatactgacgcagtgttaagggcggacgaggattagaggcgagtaatgacagtgattctatttctataagtggctggctggagatggaatcctacatttttttggacaaatgatccaacttgaagttccaaaccctaatgtaaactcatattactaagataacctacaaaaattttgagtaaaattggttttagaagtc

SEQ ID NO: 113 - protein, 370 aa, Oryza sativa
MATSSSPRLLSSFLGDRLLSASARPLLRGAAPGSRRAAYQATRTLCNLVDILFNRGQSDKPEDNPRRLRPGKVSPRLSVPKHIQRPPYVNARQRPGLHNGPEIHDERGIECMRASGKLAAQVLKFAGTLVEPGITTDEIDKAVHQMIVDNGAYPSPLGYCGFPRSVCTSVNECICHGIPDSRPLEDGDIINIDVTVYLNRVFLCISSLYLHKCQSMTMVAGQLGYHGDTSATFLCGNVDDKAKKLVQVTRECLDKAISICAPGVEIKRIGRTIQDHADKFKFGVVRQFVGHGVGQVFHAEPVVLHFRNNEWGRMTLNQTFTIEPMLTVGSVNPVIWSDDWTAVTEDGSLSAQFEHTILITEDGAEILTQC

SEQ ID NO: 114 - DNA, 1534 bp, Glycine max
  CDS (107)..(1177)
cgtcacggctgcgagaagacgacagaaggggaagggacgaaaacgaaacgcgaacggataacagtagagtaagagtagcaggagcagaaagaaagaaagaacgaaaatggcgagcggcgcctcaccgcaactgcaaatgaggttgaagtcctctttcatcggagatcgtctcttacgctgttcaacttcaaggcaccaacctcttcctcaactattccgttacaaccctggaaccaagcatgtttcgatgcagttatctagaacactttctggcttgaccaatctcttttttaatagaagaaatttggatgaattgcctaacagcaagcgtaaacgtctgagacctgggaaagtttctccgcggcgacaggtgccgaagaatataccgaggcctccgtatgtgaattctatgattcctccagggattgccagtggagctgaagtgcatgacaagaaagggatagaatgcatgagagcttctggaaggcttgcagcgcaggttcttcaatatgctggcaccttagttaagccaggcataacaacagatgaaattgaccaagcagttcaccaaatgataattgataatggtgcatacccatctcctctcggctatggtagttttcctaagagtgtctgcacatctgtaaatgaatgcatttgccatggaataccagattcccgtgcccttgaggatggtgatataatcaacattgatgttactgtttatctaaatggctatcatggggacacatcagcaactttctattgtggagatgttgatgatgaagctaaaaaactagttcaggtaactaaagaatgcctagataaagcaatatcaatatgtgcaccaggagtggagttcaagaaaattggcaaaacaattcatgatcatgcagataaatatcgttatggtgttgtccgacagtttgttggccatggagtaggaagtgtttttcatgctgaacctgttattcttcactatagaaacaatgaaagtggacgaatggtgctaaatcaaacctttacaattgaacctatgctgactattggcagcatcaatcctgtgatgtggaatgacgactggacagttgtaacggaagatggaagcctttcagcacagtttgaacacaccattctgataacacctgacggggctgagattatgactcaatgctgaaagatgcaacacttgttatttatggataaaaccacatcgagaaacttcattatttaaatgcaactgatttaattacttctagttcgtatatagaacatagtttatgctctcttccgtgtctcaattgataatttttttttcattcttatgggggagaaaataagtccggtgtggcttgagcatgttggagagccggaaaaaaataattttctgcttgaggcgcagttcatgaatttcacgcggggccattagcactgcactaattgtaggacactatttatgctaaaaatataaaatgtccccgataaatattatatatttttttccaagattaatattatattattatttactatc

SEQ ID NO: 115 - protein, 356 aa, Glycine max
MASGASPQLQMRLKSSFIGDRLLRCSTSRHQPLPQLFRYNPGTKHVSMQLSRTLSGLTNLFFNRRNLDELPNSKRKRLRPGKVSPRRQVPKNIPRPPYVNSMIPPGIASGAEVHDKKGIECMRASGRLAAQVLQYAGTLVKPGITTDEIDQAVHQMIIDNGAYPSPLGYGSFPKSVCTSVNECICHGIPDSRALEDGDIINIDVTVYLNGYHGDTSATFYCGDVDDEAKKLVQVTKECLDKAISICAPGVEFKKIGKTIHDHADKYRYGVVRQFVGHGVGSVFHAEPVILHYRNNESGRMVLNQTFTIEPMLTIGSINPVMWNDDWTVVTEDGSLSAQFEHTILITPDGAEIMTQC

SEQ ID NO: 116 - DNA, 1360 bp, Zea mays
  CDS (101)..(1147)
attgggaccctcgaggcggcgggaaccacatttgccgcttggccgcacggccgcacccgcacgccagaaacagctctcgcgttgcttccgcacgccgcccatggcgagcctgtcgtcgccgagtctcctctcttccttcctcggcgaccgcctcgcactctccactaggcctctccttctccgctccgctgtcccaggcagcaggcggctggcgtatcaagcaacgagaacgctatgcaacttggtggatatcctatttaacaggagaaatcaggatgatgcaccagaaaacaaccctagacgcctgcgtcctgggaaagtatctccacgccttagtgttcccaatcatatacaacggcctccatatgtcaattctcgtcaacaacgacctggtatgaataatggacctgaaatacatgatgagaacgggatcgagtgcatgagagcttctggaaagcttgctgcacaggttttgaaatttgctgggactcttgtaaagccaggcataacgactgatgaaattgataaagcagtgcaccaaatgataattgataatggagcatatccttcacctcttggttattgtggatacccaaagagtgtctgcacttcagtgaatgaatgcatctgtcatgggattccggattctcgtccccttgaggatggagatatcatcaatattgatgttactgtctacctcaatggctaccatggtgatacatctgctacatttctttgcggtgatgttgatgacgaagctaagaaattagttaaggtgacaagagaatgtctcgacaaggctatatcgatttgttcacctggggtggagatcaaacaaattggtagaactatacaggatcatgcagacaagttcaagtttggtgtagttagacagtttgttggccatggggttggcaaagtttttcatgctgagcctgttgtgcttcatttcagaaacaatgaatggggacgtatgatgttgaatcaaacatttactatagagcccatgctaaccatagggagcatcaaccctgtcatgtggtccgatgactggaccgcagtgacagaagacggcagcttgtcagcacagtttgagcacacgatacttattaccgaagatggccctgaaatactgacacagtgttaatggaaggccaaataacaaagaacaatcgttagtcagctggcaagatcctgcatttctttttggggactaattggtccaacctaaactctgatgcaaaatggcaaactcacattgtaatctcggttcatcggtacaacgatatatgtatagaaattgtactattttcgaagttatatttgagaaaaaaatttgctggtgcccgcggacgctggg

SEQ ID NO: 117 - protein, 348 aa, Zea mays
MASLSSPSLLSSFLGDRLALSTRPLLLRSAVPGSRRLAYQATRTLCNLVDILFNRRNQDDAPENNPRRLRPGKVSPRLSVPNHIQRPPYVNSRQQRPGMNNGPEIHDENGIECMRASGKLAAQVLKFAGTLVKPGITTDEIDKAVHQMIIDNGAYPSPLGYCGYPKSVCTSVNECICHGIPDSRPLEDGDIINIDVTVYLNGYHGDTSATFLCGDVDDEAKKLVKVTRECLDKAISICSPGVEIKQIGRTIQDHADKFKFGVVRQFVGHGVGKVFHAEPVVLHFRNNEWGRMMLNQTFTIEPMLTIGSINPVMWSDDWTAVTEDGSLSAQFEHTILITEDGPEILTQC

SEQ ID NO: 118 - DNA, 1734 bp, Zea mays
  CDS (140)..(1192)
  misc_feature (4)..(4): n is a, g, c or t
  misc_feature (1713)..(1713): n is a, g, c or t
cggncgcgtccgcccacgcgtcctgaccggccggggggcccgcttatcccttcgccttctctcgggccgccctcgacgacacctcgaagacacacacctccgttcctccctcacgccggcggcctgtatccctctccccatggctgctggactgggagcgcgcccctccgccaccttcgaggccggaaggttccggcctctcgctgcccctctccgccccgtccgctccggaaaattcgtagtgcctaagcgatgcttcactgtgtcaagtaggcttgcatgggtggaagatgagcttatggagataaaaaagtcacaagagcaaagttcagtaaaatcaaagaaaagaccacctttgaggcgtggaaaggtctccccacaacttcctgtaccagggcacattccaagaccatcttatgttggttcaaaaggattgccagaactatgcaagggccaattacacgatgctcaaggaattgctggaatgagagctgcttgcaaacttgctgcccgtgttcttgattttgctgggactttagttaagccatccattactacaaatgaaattgacgaagcagtccataatatgatcattgaagctggtgcttatccttctccacttggctatcatggatttcctaaaagtatatgtacatcagtaaatgagtgtgtctgtcatggggtacctgattcaactcagctgcagaatggggatattataaatattgatgtaaatgtgttcctgaatggataccatgggggtacctccagaacatttgcatgtggacaagttgatgattctatcaaacattttctcaatgcagctgaagaatgcttggagaaaggcatttctatctgcagggatggtgtgaactacagaaagattggcaagaaaataagcaagcttgcctatttttatggctattatgtggtggaacgctttgttggccatgggattggaactatgtatcattctgagccacttatcctacatcatgccaacgaaaactcagggcgtatggttgagggccaaacatttacaattgaacctatactcacaatggagaaaacagagtgtgttacatgggaagatggatggacgactgtcactgctgatggtagctgggctgcgcagtttgagcataccatactggtgactagggacggtgcagaaatactgacgaaagtttgagctattctcctgcccgataattcttgtcagaactctcagctatggttcctgtcccaagtcatcctggtcatgtccgttgctcgtcgcaatactcatttcagagttttgagatctgctgcaggccgacatacgggaaaggtttcccccatgtagcagcaacttgcaggtgataggtgagggcacacacacacacagagacacggctgcatctctgtgattaacacattactggtctcctgcagcctgctgtagtggtgtttgctgtgcctttggattctagaagacattctgtatataaaacagcactcctaacagttcagtctagaacctagaagtagaaactgttattgttatgatacggaagcactttaggggaacagttggagacacatttttatgtttttcaaaaaaaaaatgatttagaaaagacttatagggagctcttggaaatgctctaataaaaacatctcctaaagtttttggacgtaaaaaaaaaaaaaaaaaaaaaaaaaaaaaaaacncgagggggagaacggtaccca

SEQ ID NO: 119 - protein, 350 aa, Zea mays
MAAGLGARPSATFEAGRFRPLAAPLRPVRSGKFVVPKRCFTVSSRLAWVEDELMEIKKSQEQSSVKSKKRPPLRRGKVSPQLPVPGHIPRPSYVGSKGLPELCKGQLHDAQGIAGMRAACKLAARVLDFAGTLVKPSITTNEIDEAVHNMIIEAGAYPSPLGYHGFPKSICTSVNECVCHGVPDSTQLQNGDIINIDVNVFLNGYHGGTSRTFACGQVDDSIKHFLNAAEECLEKGISICRDGVNYRKIGKKISKLAYFYGYYVVERFVGHGIGTMYHSEPLILHHANENSGRMVEGQTFTIEPILTMEKTECVTWEDGWTTVTADGSWAAQFEHTILVTRDGAEILTKV

SEQ ID NO: 120 - DNA, 1389 bp, Zea mays
  CDS (184)..(1209)
gaaaagatgaagctctaagattgatgaattggaacaacagtgatcctcatttcagacgtattatcctcttgcttgttcgtcctcgtccggttcttcgccctcgccgcgcaggactaccaatccaaactggcgacgaccctgctgccaccccacagcagatttgaggagcggacgcccgtttaaatggctattggagtcccatccatggagctccaccgctcctcaccgttgctctcgggtggccgaggaggaaatacatgcctacagaagaagcccttctttgtccaagcaaagagactagtggggatggagaaagcaagtacgaggccaggaacacaagagtctggacagacaaagaaaagagcacccctggttcgtggaactgttagcccacctcttccagtaccaggaaacatacctcggcctccttatgtcggcacagaatatgtaccagagatagcaaaagagatacaaatgcatgacaaagagggcattgtccacatgagagctgcttgcgagctcgcggctcgtgttcttgactatgcaggaacgttagtgaaaccctctgtaacaacagacgaaattgataaagcagtgcacaagatgatcatcgatgctggagcctatccatcaccacttggatatggtgggtttccaaaaagtgtatgcacctcagtgaatgagtgcatgtgccatggaattcctgattcacgcgagctacaggatggagacataattaacattgatgtcactgtctacttgaatggttatcatggggatacctcaaaaacatttctttgtggagaagtcgatgaagccagtaaacgacttgtgaaggttactgaagagtgcttgctcaggggcatatcaacatgcaaacatggtaccagctttaagaagattggcagaagaataagtgagcatgctgagaggaacggttttggtgttgtggagtgttttgttgggcatggagtcggcagggtatttcactcagaaccaattatctatcaccagaggaacaacagaccgggccagatgattgaagggcagactttcacaatagagccgatcatatccatggggagcatcgagtgcgacatgtgggacgacggctggactgccgtgacgacggacggcagcttggcggcgcagttcgagcacaccatactgatcaccaggaccggagccgagatcctcaccaagtgctaggaggaaaggaaatcgcatgtgcccgatagccgacggtaggtaatctgtattcgtgaggtggtgaggatgcttgaggtgacctattttgtctcgcaaaatgggcgtgctacagaatagtgaagaaaagggttgagagattgcaaatggcaggtttgggcaaagagggccaagttctaggcc

SEQ ID NO: 121 - protein, 341 aa, Zea mays
MAIGVPSMELHRSSPLLSGGRGGNTCLQKKPFFVQAKRLVGMEKASTRPGTQESGQTKKRAPLVRGTVSPPLPVPGNIPRPPYVGTEYVPEIAKEIQMHDKEGIVHMRAACELAARVLDYAGTLVKPSVTTDEIDKAVHKMIIDAGAYPSPLGYGGFPKSVCTSVNECMCHGIPDSRELQDGDIINIDVTVYLNGYHGDTSKTFLCGEVDEASKRLVKVTEECLLRGISTCKHGTSFKKIGRRISEHAERNGFGVVECFVGHGVGRVFHSEPIIYHQRNNRPGQMIEGQTFTIEPIISMGSIECDMWDDGWTAVTTDGSLAAQFEHTILITRTGAEILTKC

SEQ ID NO: 122 - DNA, 1320 bp, Triticum aestivum
  CDS (131)..(1168)
ctttttgcagtgtctggccgtcgcgctctcgccgtctcgctgccggctgccggctgcccctccccctcgccgcgcccgatttctccgccaactcccatacccaagttctagggaaagatacactgctccgatggcggtcagagttccgtccatggagctgaaccgctccccgccgctcctctccggcggcagaggcaaaacatgccttcagaagcctttcattgtccaagcaaagagatcaggtggattggagaaagcaaatactagcaggtcacgaggaccgcaagcttctgaaaaactcaagaaaagagaacccctgactcgtgggactgttagtgcgcctcttccggtaccaggacacatacctcgacctccttacgttggatcaaacaaaatgcccgagatatcgagtgagagacaaatgcaggacaaagacaccatcgtgcacatgaaagctgcatgtgagcttgctgctcgtgttcttcaaaatgcagggaaattagtcaaaccctctgtaacaacagacgaaattgataaagcagtgcacaagatgatcattgatgctggagcctatccatccccgcttggatacggtgggtttccaaaaagtgtatgcacatcagtgaacgaatgcatgtgccatggtattcctgattcacgagaactaaaggatggagacataattaacatcgatgtcactgtctacttgaacggttttcatggggatacctctaaaacgtttttctgtggagaagttgacgaagctgctaaaagacttgtgaaggttactgaagagtgcatgcttaggggcatatcatcctgcaaacacggtgtgagctttaagaaaatcggcagaagaataagcgagcatgctgagaggaatggatttggtgtcgtggagcaatttgttgggcatggagttggcagagtttttcattcacaaccaattatatatcaccagcgcaacaacatgccagggcagatggttgaaggccagacgttcacaatagagccgatcctgaccatgggaagcaacagcaacagcatcgagtgcgacatgtgggaggacggctggacggcggtgacgacggacggcagcctggcggcgcagttcgagcacaccatcctcatcaccaggaccggcgcagagatcctaaccaaatgctagcaaagccagcgctgaaggcgtacggatcctgaccgcgtagatcacgtgatttcttcttatgttgtatgccaaagcatcactggaacagctgcttacgtataaccgatgatttttggcagcggcaaagagctccaggcttcctctggcacact

SEQ ID NO: 123 - protein, 345 aa, Triticum aestivum
MAVRVPSMELNRSPPLLSGGRGKTCLQKPFIVQAKRSGGLEKANTSRSRGPQASEKLKKREPLTRGTVSAPLPVPGHIPRPPYVGSNKMPEISSERQMQDKDTIVHMKAACELAARVLQNAGKLVKPSVTTDEIDKAVHKMIIDAGAYPSPLGYGGFPKSVCTSVNECMCHGIPDSRELKDGDIINIDVTVYLNGFHGDTSKTFFCGEVDEAAKRLVKVTEECMLRGISSCKHGVSFKKIGRRISEHAERNGFGVVEQFVGHGVGRVFHSQPIIYHQRNNMPGQMVEGQTFTIEPILTMGSNSNSIECDMWEDGWTAVTTDGSLAAQFEHTILITRTGAEILTKC

SEQ ID NO: 124 - DNA, 1320 bp, Triticum aestivum; identical to SEQ ID NO: 122
  CDS (152)..(1168)

SEQ ID NO: 125 - protein, 338 aa, Triticum aestivum
MELNRSPPLLSGGRGKTCLQKPFIVQAKRSGGLEKANTSRSRGPQASEKLKKREPLTRGTVSAPLPVPGHIPRPPYVGSNKMPEISSERQMQDKDTIVHMKAACELAARVLQNAGKLVKPSVTTDEIDKAVHKMIIDAGAYPSPLGYGGFPKSVCTSVNECMCHGIPDSRELKDGDIINIDVTVYLNGFHGDTSKTFFCGEVDEAAKRLVKVTEECMLRGISSCKHGVSFKKIGRRISEHAERNGFGVVEQFVGHGVGRVFHSQPIIYHQRNNMPGQMVEGQTFTIEPILTMGSNSNSIECDMWEDGWTAVTTDGSLAAQFEHTILITRTGAEILTKC

SEQ ID NO: 126 - DNA, 1317 bp, Zea mays subsp. mays
  CDS (155)..(1159)
aatttttcctcacgtattatcctcttgcttgttcgtccggttcttcgccctcgccgcgcgggactaccaatccaaactggcgacgaccctgctgccaccccacagcagatttgaggagcggacgcccgtttaaatggctattggagtcccatccatggagctccaccgctcctcaccgttgctctcgggtggccgaggaggaaatacatgcctacagaagaagcccttctttgtccaagcaaagagactagtggggatggagaaagcaagtacgaggccaggaacacaagagtctggacagacaaagaaaagagcacccctggttcgtggaactgttagcccacctcttccagtaccaggaaacatacctcggcctccttatgtcggcacagaatatgtaccagagatagcaaaagagatacaaatgcatgacaaagagggcattgtccacatgagagctgcttgcgagctcgcggctcgtgttcttgactatgcaggaacgttagtgaaaccctctgtaacaacagacgaaattgataaagcagtgcacaagatgatcatcgatgctggagcctatccatcaccacttggatatggtgggtttccaaaaagtgtatgcacctcagtgaatgagtgcatgtgccatggaattcctgattcacgcgagctacaggatggagacataattaacattgatgtcactgtctacttgaatggttatcatggggatacctcaaaaacatttctttgtggagaagtcgatgaagccagtaaacgacttgtgaaggttactgaagagtgcttgctcaggggcatatcaacatgcaaacatggtaccagctttaagaagattggcagaagaataagtgagcatgctgagaggaacggttttggtgttgtggagtgttttgttgggcatggagtcggcagggtatttcactcagaaccaattatctatcaccagaggaacaacagaccgggccagatgattgaagggcagactttcacaatagagccgatcatatcgatggggagcatcgagtgcgacatgtgggacgacggctggactgccgtgacgacggacggcagcttggcggcgcagttcgagcacaccatactgatcaccaggaccggagccgagatcctcaccaagtgctaggaggaaaggaaatcgcatgtgcccgatagccgacggtaggtaatctgtattcgtgaggtggtgaggatgcttgaggtgacctattttgtctcgcaaaatgggcgtgctacagaatagtgaagaaaagggttgagagattgcaaatggcaggtttggcc

SEQ ID NO: 127 - protein, 334 aa, Zea mays subsp. mays
MELHRSSPLLSGGRGGNTCLQKKPFFVQAKRLVGMEKASTRPGTQESGQTKKRAPLVRGTVSPPLPVPGNIPRPPYVGTEYVPEIAKEIQMHDKEGIVHMRAACELAARVLDYAGTLVKPSVTTDEIDKAVHKMIIDAGAYPSPLGYGGFPKSVCTSVNECMCHGIPDSRELQDGDIINIDVTVYLNGYHGDTSKTFLCGEVDEASKRLVKVTEECLLRGISTCKHGTSFKKIGRRISEHAERNGFGVVECFVGHGVGRVFHSEPIIYHQRNNRPGQMIEGQTFTIEPIISMGSIECDMWDDGWTAVTTDGSLAAQFEHTILITRTGAEILTKC

SEQ ID NO: 128 - DNA, 1317 bp, Zea mays subsp. mays; identical to SEQ ID NO: 126
  CDS (257)..(1159)

SEQ ID NO: 129 - protein, 300 aa, Zea mays subsp. mays
MEKASTRPGTQESGQTKKRAPLVRGTVSPPLPVPGNIPRPPYVGTEYVPEIAKEIQMHDKEGIVHMRAACELAARVLDYAGTLVKPSVTTDEIDKAVHKMIIDAGAYPSPLGYGGFPKSVCTSVNECMCHGIPDSRELQDGDIINIDVTVYLNGYHGDTSKTFLCGEVDEASKRLVKVTEECLLRGISTCKHGTSFKKIGRRISEHAERNGFGVVECFVGHGVGRVFHSEPIIYHQRNNRPGQMIEGQTFTIEPIISMGSIECDMWDDGWTAVTTDGSLAAQFEHTILITRTGAEILTKC

SEQ ID NO: 130 - DNA, 1438 bp, Glycine max
  CDS (46)..(1146)
attatcctcactcactcacaaacacatactcttcttcttcttccaatggcgctcactgcttcgctcgctaacaacgcatttctgaaaatcccaacactccatcatggcgaatgctcactgtcttcgtcatccttcatcggttctcggctcacactctcgcgctcttctactcttcaagggaaccaattgctttcgagaaagcaattcgtggttttcgcgaggaagatttcggggttggaggaggccatgaatatcagaagagaacgtgaagttcgagttgtgccaaagtttaagaaaaggcctccattaaggcgtgggagagtatcaccacatctccctgttcctgaccacataccaaggcctccttatgtaggttcagatatacttccagaaattgcaagtgagcatcaaattcatgattctgaaggtatagctaaaatgagggctgcaggtgagcttgcagcgcgtgtcttaaactttgcaggaactatggttaggccttccataacaactaatgagattgataaagcagtgcaccagatgataattgatgctggtgcttatccctcaccccttggctatggtggatttccgaaaagcgtgtgcacatcagttaatgagtgcatgtgccatggaatacctgattctcggcagttacagaatggtgatattattaacattgatgtgacagtctacctggatggatatcacggagacacgtcaaagacatttttttgtggggaagtcagtgatgaactgaaaaatcttgttaaggtaactgaagaatgcctggagaagggaatagctgcgtgcaaggacggtgctctctttaggaaaattggaaagagaatcagtgagcatgctgaaaagtatggctatggtgtagtggagcgttttgttgggcatggtgtgggaacagtgtttcattctgaaccaattattatacacaatcgcaatgagaaggcaggccgcatggttgaaggtcaaacatttacaattgagccgattctttcaatgggaagcattgattccattacatggccagacaactggacaacactaacagctgatggtagtccggctgcacagtttgagcataccattttgataactaagactggagccgaaattttgactacatgttgacatggtaattctttgtttaatccacattgatcatgttatgaaatatgaatatagtttgtgtctatgttgtaaatatgtgcccttaaatcaatttgcttctggaatattatgctctggcaagtaaagattgccttcagaagctgtataccaaattctttagtgcatagaattttcatatatgatggcaccagatatagaagacatagattcagcagtacatgtttctatcagagaatacaaactgtcaaaatgaaagttgaattggtagtctaataaaaaaaaaaaaaaaaaa

SEQ ID NO: 131 - protein, 366 aa, Glycine max
MALTASLANNAFLKIPTLHHGECSLSSSSFIGSRLTLSRSSTLQGNQLLSRKQFVVFARKISGLEEAMNIRREREVRVVPKFKKRPPLRRGRVSPHLPVPDHIPRPPYVGSDILPEIASEHQIHDSEGIAKMRAAGELAARVLNFAGTMVRPSITTNEIDKAVHQMIIDAGAYPSPLGYGGFPKSVCTSVNECMCHGIPDSRQLQNGDIINIDVTVYLDGYHGDTSKTFFCGEVSDELKNLVKVTEECLEKGIAACKDGALFRKIGKRISEHAEKYGYGVVERFVGHGVGTVFHSEPIIIHNRNEKAGRMVEGQTFTIEPILSMGSIDSITWPDNWTTLTADGSPAAQFEHTILITKTGAEILTTC

SEQ ID NO: 132 - DNA, 1071 bp, Glycine max
  CDS (1)..(1071)
atggcgagcggcgcctcaccgcaactgcaaatgaggttgaagtcctctttcatcggagatcgtctcttacgctgttcaacttcaaggcaccaacctcttcctcaactattccgttacaaccctggaaccaagcatgtttcgatgcagttatctagaacactttctggcttgaccaatctcttttttaatagaagaaatttggatgaattgcctaacagcaagcgtaaacgtctgagacctgggaaagtttctccgcggcgacaggtgccgaagaatataccgaggcctccgtatgtgaattctatgattcctccagggattgccagtggagctgaagtgcatgacaagaaagggatagaatgcatgagagcttctggaaggcttgcagcgcaggttcttcaatatgctggcaccttagttaagccaggcataacaacagatgaaattgaccaagcagttcaccaaatgataattgataatggtgcatacccatctcctctcggctatggtagttttcctaagagtgtctgcacatctgtaaatgaatgcatttgccatggaataccagattcccgtgcccttgaggatggtgatataatcaacattgatgttactgtttatctaaatggctatcatggggacacatcagcaactttctattgtggagatgttgatgatgaagctaaaaaactagttcaggtaactaaagaatgcctagataaagcaatatcaatatgtgcaccaggagtggagttcaagaaaattggcaaaacaattcatgatcatgcagataaatatcgttatggtgttgtccgacagtttgttggccatggagttggaagtgtttttcatgctgatcctgttattcttcactatagaaacaatgaaagtggacgaatggtgctaaatcaaacctttacaattgaacctatgctgactattggcagcatcaatcctgtgatgtggaatgacgactggacagttgtaacggaagatggaagcctttcagcacagtttgaacacaccattctgataacacctgacggggctgagattatgactcaatgctga

SEQ ID NO: 133 - protein, 356 aa, Glycine max
MASGASPQLQMRLKSSFIGDRLLRCSTSRHQPLPQLFRYNPGTKHVSMQLSRTLSGLTNLFFNRRNLDELPNSKRKRLRPGKVSPRRQVPKNIPRPPYVNSMIPPGIASGAEVHDKKGIECMRASGRLAAQVLQYAGTLVKPGITTDEIDQAVHQMIIDNGAYPSPLGYGSFPKSVCTSVNECICHGIPDSRALEDGDIINIDVTVYLNGYHGDTSATFYCGDVDDEAKKLVQVTKECLDKAISICAPGVEFKKIGKTIHDHADKYRYGVVRQFVGHGVGSVFHADPVILHYRNNESGRMVLNQTFTIEPMLTIGSINPVMWNDDWTVVTEDGSLSAQFEHTILITPDGAEIMTQC

SEQ ID NO: 134 - DNA, 1101 bp, Glycine max
  CDS (1)..(1101)
atggcgctcactgcttcgctcgctaacaacgcatttctgaaaatcccaacactccatcatggcgaatgctcactgtcttcgtcatccttcatcggttctcggctcacactctcgcgctcttctactcttcaagggaaccaattgctttcgagaaagcaattcgtggttttcgcgaggaagatttcggggttggaggaggccatgaatatcagaagagaacgtgaagttcgagttgtgccaaagtttaagaaaaggcctccattaaggcgtgggagagtatcaccacatctccctgttcctgaccacataccaaggcctccttatgtaggttcagatatacttccagaaattgcaagtgagcatcaaattcatgattctgaaggtatagctaaaatgagggctgcaggtgagcttgcagcgcgtgtcttaaactttgcaggaactatggttaggccttccataacaactaatgagattgataaagcagtgcaccagatgataattgatgctggtgcttatccctcaccccttggctatggtggatttccgaaaagcgtgtgcacatcagttaatgagtgcatgtgccatggaatacctgattctcggcagttacagaatggtgatattattaacattgatgtgacagtctacctggatggatatcacggagacacgtcaaagacatttttttgtggggaagtcagtgatgaactgaaaaatcttgtcaaggtaactgaagaatgcctggagaagggaatagctgcgtgcaaggacggtgctctctttaggaaaattggaaagagaatcagtgagcatgctgaaaagtatggctatggtgtagtggagcgttttgttgggcatggtgtgggaacagtgttccattctgaaccaattattatacacaatcgcaatgagaaggcaggccgcatgattgaaggtcaaacatttacaattgagccgattctttcgatgggaagcattgattccattacatggcctgacaactggacaacaataacagctgatggtagtccggctgcacagtttgagcataccattttgataactaagactggagccgaaattttgactaaatgttga

SEQ ID NO: 135 - protein, 366 aa, Glycine max
MALTASLANNAFLKIPTLHHGECSLSSSSFIGSRLTLSRSSTLQGNQLLSRKQFVVFARKISGLEEAMNIRREREVRVVPKFKKRPPLRRGRVSPHLPVPDHIPRPPYVGSDILPEIASEHQIHDSEGIAKMRAAGELAARVLNFAGTMVRPSITTNEIDKAVHQMIIDAGAYPSPLGYGGFPKSVCTSVNECMCHGIPDSRQLQNGDIINIDVTVYLDGYHGDTSKTFFCGEVSDELKNLVKVTEECLEKGIAACKDGALFRKIGKRISEHAEKYGYGVVERFVGHGVGTVFHSEPIIIHNRNEKAGRMIEGQTFTIEPILSMGSIDSITWPDNWTTITADGSPAAQFEHTILITKTGAEILTKC

SEQ ID NO: 136 - DNA, 1113 bp, Oryza sativa (japonica cultivar-group)
  CDS (1)..(1113)
atggcgacctcgtcgtcgccgcgcctgctctcctccttcctcggcgaccgcctcctctccgccagcgccaggccgctcctccgcggggccgctccaggaagcaggcgggccgcgtatcaggcgacgagaacgctctgcaacctggtggatatcctcttcaacagaggtcagagtgacaaaccggaagataaccctagacgcctacggcctgggaaagtatctcctcgtctaagcgttcccaaacatatacagcggccaccatatgtcaatgctcgtcaaagacctggattgcacaatggacctgaaatacatgatgagagagggatcgaatgcatgagggcttctggaaagcttgctgcacaagttttgaagtttgccgggactcttgtagagccaggcataacaactgatgagattgataaagcggtgcaccaaatgatagtagataatggagcatacccttcgccacttggttattgcggttttccaaagagtgtctgcacctcagtgaatgagtgcatctgtcatggtatacctgattctcgtcctcttgaagatggtgacattatcaacattgatgttactgtttatctcaatagagtgtttctatgcatctcctccttatatttgcataaatgtcaaagtatgacaatggtggctggacagctgggttaccacggtgatacatctgctacatttctatgtggtaatgttgatgacaaagctaagaaattagttcaggtaacaagagaatgtctcgacaaggctatatcaatctgcgcccctggggtggagatcaaacgtattggtcgaactatacaggaccatgcagataaattcaagtttggtgtagttcgacagttcgtcggtcatggggttggacaagtgtttcatgctgaacctgtggtgcttcatttccgaaacaatgaatggggccgtatgacattgaaccaaacatttactatagagcccatgctaaccgtggggagcgtaaatccagttatatggtccgatgactggacagcggtgactgaagacggcagcttgtcagcacagtttgagcacacaatactgattacagaggatggcgcggagatactgacgcagtgttaa

SEQ ID NO: 137 - protein, 370 aa, Oryza sativa (japonica cultivar-group)
MATSSSPRLLSSFLGDRLLSASARPLLRGAAPGSRRAAYQATRTLCNLVDILFNRGQSDKPEDNPRRLRPGKVSPRLSVPKHIQRPPYVNARQRPGLHNGPEIHDERGIECMRASGKLAAQVLKFAGTLVEPGITTDEIDKAVHQMIVDNGAYPSPLGYCGFPKSVCTSVNECICHGIPDSRPLEDGDIINIDVTVYLNRVFLCISSLYLHKCQSMTMVAGQLGYHGDTSATFLCGNVDDKAKKLVQVTRECLDKAISICAPGVEIKRIGRTIQDHADKFKFGVVRQFVGHGVGQVFHAEPVVLHFRNNEWGRMTLNQTFTIEPMLTVGSVNPVIWSDDWTAVTEDGSLSAQFEHTILITEDGAEILTQC

SEQ ID NO: 138 - DNA, 1002 bp, Oryza sativa (japonica cultivar-group)
  CDS (1)..(1002)
atggagctgcaccgccccccgccgtccgtatccggtgtccgaggaaaaagctgccttcaaaagcctttccttgtccaagcaaagagattagagggattggagaaggcaaacccaaggtcacgaggaaagcaaagtttggaacaagtgaagaaaagagcaccactgatccgtgggacagtgagtccacctctaccagtaccaggtcacataactcaacctccttacgttggtaaaaaggatgcttcagagatagcaagtgagatacaaatgcatgacaaagtgagcattattcacatgaaagctgcatgtgagcttgctgctcgtgttcttgaatacgctggaactttagtgaaaccctctgtaacaacagacgaaattgataaagcagtgcacaagatgatcattgatgctggagcctatccatcccctctcggatacggagggtttccaaaaagcgtgtgcacatctgtgaatgaatgcatctgccatggaattcctgattctcgtgaacttcaggatggagacataattaatatcgacgtcactgtctacctgaatggctatcatggggacacctcaaagactttcctatgtggagaagtggatgaagccagtaaacgacttgtgaaggttactgaagagtgcatgctcagggctatatcagcttgcaaacatggtaccagcttgaagaaaattggcagaagaataagcgagcatgctgagaggcacggatttggtgttgtggatcgttttgttgggcatggagttgggagaatatttcattcagaaccaatgatatatcaccagcgtaataatatgccaggtcaaatggttgaaggccagacattcacaatagaaccggccctatccatgggaagcattgattgcgacatgtgggacgacggctggacggccgtcacgacggacggcagcctagccgcgcagttcgagcacacgatactgattaccaagacaggagcagaaatcctcacgaaatgctag

SEQ ID NO: 139 - protein, 333 aa, Oryza sativa (japonica cultivar-group)
MELHRPPPSVSGVRGKSCLQKPFLVQAKRLEGLEKANPRSRGKQSLEQVKKRAPLIRGTVSPPLPVPGHITQPPYVGKKDASEIASEIQMHDKVSIIHMKAACELAARVLEYAGTLVKPSVTTDEIDKAVHKMIIDAGAYPSPLGYGGFPKSVCTSVNECICHGIPDSRELQDGDIINIDVTVYLNGYHGDTSKTFLCGEVDEASKRLVKVTEECMLRAISACKHGTSLKKIGRRISEHAERHGFGVVDRFVGHGVGRIFHSEPMIYHQRNNMPGQMVEGQTFTIEPALSMGSIDCDMWDDGWTAVTTDGSLAAQFEHTILITKTGAEILTKC

SEQ ID NO: 140 - DNA, 1074 bp, Oryza sativa (japonica cultivar-group)
  CDS (1)..(1074)
atggccgcgccgggcgcgtgcctggcgtcgcgctcgccacccgccttcctcgccggcgggttcctcgctgcccgccctgccgccgtctctcccatcccctcccgctccgggaaatcaatcgcaccgagccgacgctttatcgtgtctaataaacttgcttgggttgaagatgagttagtggagataacagagtcacaagagccaagctccgcaagttcaaagaaaaggccacctttgaggcgtgggaaaatctctccacaacttccggtgccagaacacattccgagaccatcttatgtaggttcgaatagaccgcaagaactatctagtgtgcgccaaatacacagtgctgaaggtatcgctggaatgagagctgcttgcaaacttgctgcccgtgctctggactttgctggaacattgattaagccatcagttactacaaatgaaattgacagggaagtgcataacatgataattgaggccggtgcttatccttctcaacttggctatggtggatttcctaaaagtatctgcacgtcactaaatgagtgtgtctgtcacggagtacctgactcaacacaactgcagaccggagacatcatgaatgttgatgtaaatgtgttcctgaacggataccatgggggtgcttctagaacatttgtatgtggagaagtggatgactctatcaggcattttctgaaggcagctgaagaatgcttggagaagggtattacagtctgcagggatggtgtcaactacaaaaagattggcaagaaaataagcaagcttgcttatttttacggctattatgtggtggatcgttttgttggacatgggattggacctatttggcattctgagccactaatcctacatcatgccaatgacaactctgggcgaatggttgaaggtcagacatttacaattgaacctattcttacaatggaaaaggctgagacagttacatgggaagatggatggactactgtcactgccgatggcagctgggctgcgcagtttaagcatactgtactagtcactcggacaggggctgaaatactgacaaaactttga

SEQ ID NO: 141 - protein, 357 aa, Oryza sativa (japonica cultivar-group)
MAAPGACLASRSPPAFLAGGFLAARPAAVSPIPSRSGKSIAPSRRFIVSNKLAWVEDELVEITESQEPSSASSKKRPPLRRGKISPQLPVPEHIPRPSYVGSNRPQELSSVRQIHSAEGIAGMRAACKLAARALDFAGTLIKPSVTTNEIDREVHNMIIEAGAYPSQLGYGGFPKSICTSLNECVCHGVPDSTQLQTGDIMNVDVNVFLNGYHGGASRTFVCGEVDDSIRHFLKAAEECLEKGITVCRDGVNYKKIGKKISKLAYFYGYYVVDRFVGHGIGPIWHSEPLILHHANDNSGRMVEGQTFTIEPILTMEKAETVTWEDGWTTVTADGSWAAQFKHTVLVTRTGAEILTKL

SEQ ID NO: 142 - DNA, 1110 bp, Arabidopsis thaliana; identical to SEQ ID NO: 104
  CDS (1)..(1110)

SEQ ID NO: 143 - protein, 369 aa, Arabidopsis thaliana; identical to SEQ ID NO: 105

SEQ ID NO: 144 - DNA, 1035 bp, Arabidopsis thaliana
  CDS (1)..(1035)
atgttgcagaagatttctcagtctatttctttatgtaacggcgatcaatttaagccgttaatatacctcgccggagctccgacgaacttcatctcttcccctctctcaggcaagaagaaatcatcttctctgagaattaaaaggatacaacaacttcaaagtacattagaagatagaataaatccaccactagtatgtggaacagtatcgccacgtcttagtgttcctgatcatatactaaagcctctatatgttgagtctagcaaagttccagagatatcaagtgaattacagattcctgactctataggcattgtgaaaatgaagaaagcgtgtgagctcgcggctcgtgtattagactatgcaggaactttggttagaccgtttgttactacagatgaaattgataaagcagtgcatcagatggttattgagtttggtgcatatccttcacctcttggatatggtggatttcctaaaagtgtttgtacatcggttaatgaatgtatgtttcacgggattcccgattctcgtccgctacagaatggagatattataaacatcgatgttgcggtttacttggatgggtatcatggagatacgtcaaagactttcttatgtggagacgtcaatggaagccttaaacaacttgtcaaggtcacagaagaatgcttggagaaaggtatatcggtttgtaaagatggagcaagcttcaaacaaatcgggaagataatcagtgagcatgctgcaaagtatggctataatatggagcgattcatcggtcatggtgtaggaacggtattacactcggaacctcttatatatcttcatagtaactatgattatgaacttgaatatatgattgaaggtcaaacttttacgctcgaaccaattctcaccattggaacaacagagtttgtaacatggcctgacaaatggacaattgtgaccgcagatggtggtccggccgcacagtttgagcatacaattcttattaccaccactggtgcagaaattctcaccatatcatcatga

SEQ ID NO: 145 - protein, 344 aa, Arabidopsis thaliana
MLQKISQSISLCNGDQFKPLIYLAGAPTNFISSPLSGKKKSSSLRIKRIQQLQSTLEDRINPPLVCGTVSPRLSVPDHILKPLYVESSKVPEISSELQIPDSIGIVKMKKACELAARVLDYAGTLVRPFVTTDEIDKAVHQMVIEFGAYPSPLGYGGFPKSVCTSVNECMFHGIPDSRPLQNGDIINIDVAVYLDGYHGDTSKTFLCGDVNGSLKQLVKVTEECLEKGISVCKDGASFKQIGKIISEHAAKYGYNMERFIGHGVGTVLHSEPLIYLHSNYDYELEYMIEGQTFTLEPILTIGTTEFVTWPDKWTIVTADGGPAAQFEHTILITTTGAEILTISS

SEQ ID NO: 146 - DNA, 1053 bp, Arabidopsis thaliana
  CDS (1)..(1053)
atggcgggcgtgaaatctctgcaacctagactcatatcttcctttctcggcaacaattctattagatcaacgcaaccacttattcatctctttcgcttcgatttaggaagaagacatgtttcgatgcaattatcaagaaccttttctggattaaccgatctcctgtttaatagaagaaatgaagatgaagttattgatggcaagagaaaacgtctgagaccgggaaatgtatctcctcgtcgtcctgttccgggtcatataacaaaacctccttatgttgattctcttcaagctcccggaatctcaagtggacttgaagttcatgataagaaaggtatagaatgcatgagagcttctggaatacttgcagctagggttcgagattacgctggcactttggttaagccaggcgtaaccactgatgaaatcgatgaagcagttcacaatatgattattgagaatggagcttatccttcgcctcttggttatggaggtttcccgaaaagtgtttgcacatctgtgaatgaatgcatttgccatggtataccagattcaagaccacttgaggatggggatattatcaacatcgatgtcacagtttatttgaatggttatcatggtgatacttcagcaactttcttctgtggaaatgttgacgagaaggctaaaaagctagtcgaggtgacgaaagagtctctcgacaaagcaatatcaatatgtggtcccggagttgagtacaagaaaatcggcaaagtcattcatgatcttgcagataaacataaatatggagttgttcgacaatttgtaggccacggggttggcagcgtcttccacgctgatccagttgttctgcatttccggaacaatgaagctggacgtatggtcttgaatcaaaccttcaccattgaaccgatgcttacaataggaagcagaaacccgataatgtgggatgataactggaccgtggtaacagaagatgcaagcctctcggcgcaattcgagcataccattcttataaccaaagatggtgctgagattctaaccaagtgttaa

SEQ ID NO: 147 - protein, 350 aa, Arabidopsis thaliana
MAGVKSLQPRLISSFLGNNSIRSTQPLIHLFRFDLGRRHVSMQLSRTFSGLTDLLFNRRNEDEVIDGKRKRLRPGNVSPRRPVPGHITKPPYVDSLQAPGISSGLEVHDKKGIECMRASGILAARVRDYAGTLVKPGVTTDEIDEAVHNMIIENGAYPSPLGYGGFPKSVCTSVNECICHGIPDSRPLEDGDIINIDVTVYLNGYHGDTSATFFCGNVDEKAKKLVEVTKESLDKAISICGPGVEYKKIGKVIHDLADKHKYGVVRQFVGHGVGSVFHADPVVLHFRNNEAGRMVLNQTFTIEPMLTIGSRNPIMWDDNWTVVTEDASLSAQFEHTILITKDGAEILTKC

SEQ ID NO: 148 - DNA, 1053 bp, Zea mays
  CDS (1)..(1053)
atggctgctggactgggagcgcgcccctccgccaccttcgtggccggaaggttccggcctctcgctgcccctctccgccccgtccgctccggcaagttcgttgtgccaaagcgatgcttcattgtatcaagcaggcttgcatgggtggaagatgagcttatggagatacaaaagtcacaagagcaaagttcagtaaaatcaaagaaaaggccacctttgaggcgtggaaaggtctccccacaacttcctgtaccagggcacattccaagaccatcttatgttggtgcgaaaggattgcctgaactatgcaagggccaattacatgatgctcaaggaattactggaatgagagctgcttgcaaacttgctgcccgtgttcttgacttcgctgggactttagttaagccatccattactacaaatgaaattgacgcagcagtccataatatgatcattgaggctggtgcttatccttctccacttggctatcatggatttcctaagagtatatgtacatcagtaaatgagtgtgtctgtcatggggtacctgattcaactcagctgcagaatggggatattataaatattgatgtaaatgtgttcctgaatggataccatgggggtacctccagaacatttgcatgtggacaagtggatgattctatcaaacattttctcaatgcagctgaagaatgcttggagaaaggcatttctatctgcagggatggtgtgaactacagaaagattggcaagaaaataagcaagcttgcctatttttatggctattatgtggtggaacgctttgttggccatgggattggaactatgtatcattctgagccactaattctacatcatgccaacgaaaactcagggcgtatggttgagggccaaacatttacaattgaacctatactcacaatggagaaaacagagtgtgttacatgggaagatggatggacgactgtcactgctgatggtagctgggctgcgcagtttgagcataccatactggtgactagggacggtgcagaaatactgacgaaagtttga

SEQ ID NO: 149 - protein, 350 aa, Zea mays
MAAGLGARPSATFVAGRFRPLAAPLRPVRSGKFVVPKRCFIVSSRLAWVEDELMEIQKSQEQSSVKSKKRPPLRRGKVSPQLPVPGHIPRPSYVGAKGLPELCKGQLHDAQGITGMRAACKLAARVLDFAGTLVKPSITTNEIDAAVHNMIIEAGAYPSPLGYHGFPKSICTSVNECVCHGVPDSTQLQNGDIINIDVNVFLNGYHGGTSRTFACGQVDDSIKHFLNAAEECLEKGISICRDGVNYRKIGKKISKLAYFYGYYVVERFVGHGIGTMYHSEPLILHHANENSGRMVEGQTFTIEPILTMEKTECVTWEDGWTTVTADGSWAAQFEHTILVTRDGAEILTKV

SEQ ID NO: 150 - DNA, 1047 bp, Zea mays
  CDS (1)..(1047)
atggcgagcctgtcgtcgccgagtctcctctcttccttcctcggcgaccgcctcgcactctccactaggcctctccttctccgctccgctgtcccaggcagcaggcggctggcgtatcaagcaacgagaacgctatgcaacttggtggatatcctatttaacaggagaaatcaggatgatgcaccagaaaacaaccctagacgcctgcgtcctgggaaagtatctccacgccttagtgttcccaatcatatacaacggcctccatatgtcaattctcgtcaacaacgacctggtatgaataatggacctgaaatacatgatgagaacgggatcgagtgcatgagagcttctggaaagcttgctgcacaggttttgaaatttgctgggactcttgtaaagccaggcataacgactgatgaaattgataaagcagtgcaccaaatgataattgataatggagcacatccttcacctcttggttattgtggatacccaaagagtgtctgcacttcagtgaatgaatgcatctgtcatgggattccggattctcgtccccttgaggatggagatatcatcaatattgatgttactgtctacctcaatggctaccatggtgatacatctgctacatttctttgcggtgatgttgatgacgaagctaagaaattagttaaggtgacaagagaatgtctcgacaaggctatatcgatttgtccacctggggtggagatcaaacaaattggtagaactatacaggatcatgcagacaagttcaagtttggtgtagttagacagtttgttggccatggggttggcaaagtttttcatgctgagcctgttgtgcttcatttcagaaacaatgaatggggacgtatgatgttgaatcaaacatttactatagagcccatgctaaccatagggagcatcaaccctgtcatgtggtccgatgactggaccgcagtgacagaagacggcagcttgtcagcacagtttgagcacacgatacttattaccgaagatggccctgaaatactgacacagtgttaa

SEQ ID NO: 151 - protein, 348 aa, Zea mays
MASLSSPSLLSSFLGDRLALSTRPLLLRSAVPGSRRLAYQATRTLCNLVDILFNRRNQDDAPENNPRRLRPGKVSPRLSVPNHIQRPPYVNSRQQRPGMNNGPEIHDENGIECMRASGKLAAQVLKFAGTLVKPGITTDEIDKAVHQMIIDNGAHPSPLGYCGYPKSVCTSVNECICHGIPDSRPLEDGDIINIDVTVYLNGYHGDTSATFLCGDVDDEAKKLVKVTRECLDKAISICPPGVEIKQIGRTIQDHADKFKFGVVRQFVGHGVGKVFHAEPVVLHFRNNEWGRMMLNQTFTIEPMLTIGSINPVMWSDDWTAVTEDGSLSAQFEHTILITEDGPEILTQC

SEQ ID NO: 152 - DNA, 1053 bp, Zea mays
  CDS (1)..(1053)
atggctgctggactgggagcgcgcccctccgccaccttcgtggccggaaggttccggcctctcgctgcccctctccgccccgtccgctccggcaagttcgttgtgccaaagcgatgcttcattgtatcaagcaggcttgcatgggtggaagatgagcttatggagatacaaaagtcacaagagcaaagttcagtaaaatcaaagaaaaggccacctttgaggcgtggaaaggtctccccacaacttcctgtaccagggcacattccaagaccatcttatgttggtgcgaaaggattgcctgaactatgcaagggccaattacatgatgctcaaggaattactggaatgagagctgcttgcaaacttgctgcccgtgttcttgacttcgctgggactttagttaagccatccattactacaaatgaaattgacgcagcagtccataatatgatcattgaggctggtgcttatccttctccacttggctatcatggatttcctaagagtatatgtacatcagtaaatgagtgtgtctgtcatggggtacctgattcaactcagctgcagaatggggatattataaatattgatgtaaatgtgttcctgaatggataccatgggggtacctccagaacatttgcatgtggacaagtggatgattctatcaaacattttctcaatgcagctgaagaatgcttggagaaaggcatttctatctgcagggatggtgtgaactacagaaagattggcaagaaaataagcaagcttgcctatttttatggctattatgtggtggaacgctttgttgggcatgggattgaaactatgtatcattctgagccactaattctacatcatgccaacgaaaactcagggcgtatggttgagggccaaacatttacaattgaacctatactcacaatggagaaaacagagtgtgttacatgggaagatggatggacgactgtcactgctgatggtagctgggctgcgcagtttgagcataccatactggtgactagggacggtgcagaaatactgacgaaagtctga

SEQ ID NO: 153 - protein, 350 aa, Zea mays
MAAGLGARPSATFVAGRFRPLAAPLRPVRSGKFVVPKRCFIVSSRLAWVEDELMEIQKSQEQSSVKSKKRPPLRRGKVSPQLPVPGHIPRPSYVGAKGLPELCKGQLHDAQGITGMRAACKLAARVLDFAGTLVKPSITTNEIDAAVHNMIIEAGAYPSPLGYHGFPKSICTSVNECVCHGVPDSTQLQNGDIINIDVNVFLNGYHGGTSRTFACGQVDDSIKHFLNAAEECLEKGISICRDGVNYRKIGKKISKLAYFYGYYVVERFVGHGIETMYHSEPLILHHANENSGRMVEGQTFTIEPILTMEKTECVTWEDGWTTVTADGSWAAQFEHTILVTRDGAEILTKV

SEQ ID NO: 154 - DNA, 1056 bp, Brassica napus
  CDS (1)..(1056)
atggcgaccgcgaaaactctgcaaccaagaatcatctcttcctttctcggcaacaactctattctagtatcaacgcagcctcttccccatctctttcgcttccatttagggagacggcatgtttcgatgcaattgtcaagaaccttgtctggattaaccaatcttctctttaatacaagaaacgttgatgaagtgattgatgccaagagaaaacgtctgaaaccaggacacgtgtctcctcgccgccctgtccctgcccacataaccaaacctccttacgttgagtctttaaacgtccccggaatctcgagtggacttgagattcacgacgaggatggtgtagagaggatgagagcttctgggaggcttgcagctagagttcgtgaatacgctgggactttggttaagcccggtgtgactacagatgagattgatgaggctgttcacaacatgatcatcgagaacggagcttatccttcgccacttggctatggaggtttccctaagagtgtttgcacgtctgtgaatgagtgcatttgccatggaatccccgattcacgaccgcttgaggatggagatataatcaacattgatgtcacagtttatttgaacggctatcacggtgatacttcagctactttcttctgtggagatgtcgacgagaaagctaaaaagctagtccaggtgactaaagagtctcttgacaaagctatatcgatatgtggacctggtgttgagtacaagaaaatcggcaaaatcattcatgatcatgcagataaatataaatatggagtggttagacaatttgtaggccacggtattggacgtgtcttccatgctgatcctgttgttctacacttccggaacaatgaagctggacgtatggttttgaatcaaaccttcaccatagaaccgatgctaaccataggaagcagaaaaccgattatgtgggatgataattggaccgtggttacagaagatgcaagcctctctgcgcaattcgagcataccattcttataaccaaagatggagctgagatactcaccgactgttag

SEQ ID NO: 155 - protein, 351 aa, Brassica napus
MATAKTLQPRIISSFLGNNSILVSTQPLPHLFRFHLGRRHVSMQLSRTLSGLTNLLFNTRNVDEVIDAKRKRLKPGHVSPRRPVPAHITKPPYVESLNVPGISSGLEIHDEDGVERMRASGRLAARVREYAGTLVKPGVTTDEIDEAVHNMIIENGAYPSPLGYGGFPKSVCTSVNECICHGIPDSRPLEDGDIINIDVTVYLNGYHGDTSATFFCGDVDEKAKKLVQVTKESLDKAISICGPGVEYKKIGKIIHDHADKYKYGVVRQFVGHGIGRVFHADPVVLHFRNNEAGRMVLNQTFTIEPMLTIGSRKPIMWDDNWTVVTEDASLSAQFEHTILITKDGAEILTDC

SEQ ID NO: 156 - DNA, 1071 bp, Glycine max
  CDS (1)..(1071)
atggcgagcggcgcctcaccgcaactgcaaatgaggttgaagtcctctttcatcggagatcgtctcttacgctgttcaacttcaaggcaccaacctcttcctcaactattccgttacaaccctggaaccaagcatgtttcgatgcagttatctagaacactttctggcttgaccaatctcttttttaatagaagaaatttggatgaattgcctaacagcaagcgtaaacgtctgagacctgggaaagtttctccgcggcgacaggtgccgaagaatataccgaggcctccgtatgtgaattctatgattcctccagggattgccagtggagctgaagtgcatgacaagaaagggatagaatgcatgagagcttctggaaggcttgcagcgcaggttcttcaatatgctggcaccttagttaagccaggcataacaacagatgaaattgaccaagcagttcaccaaatgataattgataatggtgcatacccatctcctctcggctatggtagttttcctaagagtgtctgcacatctgtaaatgaatgcatttgccatggaataccagaatcccgtgcccttgaggatggtgatataatcaacattgatgttactgtttatctaaatggctatcatggggacacatcagcaactttctattgtggagatgttgatgatgaagctaaaaaactagttcaggtaactaaagaatgcctagataaagcaatatcaatatgtgcaccaggagtggagttcaagaaaattggcaaaacaattcatgatcatgcagataaatatcgttatggtgttgtccgacagtttgttggccatggagttggaagtgtttttcatgctgatcctgttattcttcactatagaaacaatgaaagtggacgaatggtgctaaatcaaacctttacaattgaacctatgctgactattggcagcatcaatcctgtgatgtggaatgacgactggacagttgtaacggaagatggaagcctttcagcacagtttgaacacaccattctgataacacctgacggggctgagattatgactcaatgctga

SEQ ID NO: 157 - protein, 356 aa, Glycine max
MASGASPQLQMRLKSSFIGDRLLRCSTSRHQPLPQLFRYNPGTKHVSMQLSRTLSGLTNLFFNRRNLDELPNSKRKRLRPGKVSPRRQVPKNIPRPPYVNSMIPPGIASGAEVHDKKGIECMRASGRLAAQVLQYAGTLVKPGITTDEIDQAVHQMIIDNGAYPSPLGYGSFPKSVCTSVNECICHGIPESRALEDGDIINIDVTVYLNGYHGDTSATFYCGDVDDEAKKLVQVTKECLDKAISICAPGVEFKKIGKTIHDHADKYRYGVVRQFVGHGVGSVFHADPVILHYRNNESGRMVLNQTFTIEPMLTIGSINPVMWNDDWTVVTEDGSLSAQFEHTILITPDGAEIMTQC

SEQ ID NO: 158 - DNA, 1101 bp, Glycine max
  CDS (1)..(1101)
atggcgctcactgcttcgctcgctaacaacgcatttctgaaaatcccaacactccatcatggcgaatgctcactgtcttcgtcatccttcatcggttctcggctcacactctcgcgctcttgtactcttcaagggaaccaattgctttcgagaaagcaattcgtggttttcgcgaggaagatttcggggttggaggaggccatgaatatcagaagagaacgtgaagttcgagttgtgccaaagtttaagaaaaggcctccattaaggcgtgggagagtatcaccacatctccctgttcctgaccacataccaaggcctccttatgtaggttcagatatacttccagaaattgcaagtgagcatcaaattcatgattctgaaggtatagctaaaatgagggctgcaggtgagcttgcagcgcatgtcttaaactttgcaggaactatggttaggccttccataacaactaatgagattgataaagcagtgcaccagatgataattgatgccggtgcttatccctcaccccttggctatggtggatttccgaaaagcgtgtgcacatcagttaatgagtgcatgtgccatggaatacctgattctcggcagttacagaatggtgatattattaacattgatgtgacagtctacctggatggatatcatggagacacatcaaagacatttttttgtggggaagtcggtgatgaactcaaaaatcttgttaaggtaactgaagagtgcctggagaagggaatagctgcgtgcaaggacggtgctctctttaggaaaattggaaagagaatcagtgagcatgctgaaaagtatggctatggtgtagtggagcgttttgttgggcatggtgtgggaacagtgttccattctgaaccaattattatgcacaatcgcaatgagaaggcaggtcgcatgattgaaggtcaaacatttacaattgagccgattctttcgatgggaagcattgattccattacatggcctgacaactggacaacaataacagctgatggtagtccggctgcacagtttgagcataccattttgataactaagactggagccgaaattttgactaaatgttga

SEQ ID NO: 159 - protein, 366 aa, Glycine max
MALTASLANNAFLKIPTLHHGECSLSSSSFIGSRLTLSRSCTLQGNQLLSRKQFVVFARKISGLEEAMNIRREREVRVVPKFKKRPPLRRGRVSPHLPVPDHIPRPPYVGSDILPEIASEHQIHDSEGIAKMRAAGELAAHVLNFAGTMVRPSITTNEIDKAVHQMIIDAGAYPSPLGYGGFPKSVCTSVNECMCHGIPDSRQLQNGDIINIDVTVYLDGYHGDTSKTFFCGEVGDELKNLVKVTEECLEKGIAACKDGALFRKIGKRISEHAEKYGYGVVERFVGHGVGTVFHSEPIIMHNRNEKAGRMIEGQTFTIEPILSMGSIDSITWPDNWTTITADGSPAAQFEHTILITKTGAEILTKC

SEQ ID NO: 160 - DNA, 1101 bp, Glycine max
  CDS (1)..(1101)
atggcgctcactgcttcgctcgctaacaacgcatttctgaaaatcccaacactccatcatggcgaatgctcactgtcttcgtcatccttcatcggttctcggctcacactctcgcgctcttgtactcttcaagggaaccaattgctttcgagaaagcaattcgtggttttcgcgaggaagatttcggggttggaggaggccatgaatatcagaagagaacgtgaagttcgagttgtgccaaagtttaagaaaaggcctccattaaggcgtgggagagtatcaccacatctccctgttcctgaccacataccaaggcctccttatgtaggttcagatatacttccagaaattgcaagtgagcatcaaattcatgattctgaaggtatagctaaaatgagggctgcaggtgagcttgcagcgcatgtcttaaactttgcaggaactatggttaggccttctgtaacaactaatgagattgataaagcagtgcaccagatgataattgatgccggtgcttatccctcaccccttggctatggtggatttccgaaaagcgtgtgcacatcagttaatgagtgcatgtgccatggaatacctgattctcggcagttacagaatggtgatattattaacattgatgtgacagtctacctggatggatatcacggagacacatcaaagacatttttttgtggggaagtcagtgatgaactgaaaaatcttgtcaaggtaactgaagaatgcctggagaagggaatagctgcgtgcaaggacggtgctctctttaggaaaattggaaagagaatcagtgagcatgctgaaaagtatggctatggtgtagtggagcgttttgttgggcatggtgtgggaacagtgttccattctgaaccaattattatgcacaatcgcaatgagaaggcaggtcgcatgattgaaggtcaaacatttacaattgagccgattctttcgatgggaagcattgattccattacatggcctgacaactggacaacaataacagctgatggtagtccggctgcacagtttgagcataccattttgataactaagactggagccgaaattttgactaaatgttga

SEQ ID NO: 161 - protein, 366 aa, Glycine max
MALTASLANNAFLKIPTLHHGECSLSSSSFIGSRLTLSRSCTLQGNQLLSRKQFVVFARKISGLEEAMNIRREREVRVVPKFKKRPPLRRGRVSPHLPVPDHIPRPPYVGSDILPEIASEHQIHDSEGIAKMRAAGELAAHVLNFAGTMVRPSVTTNEIDKAVHQMIIDAGAYPSPLGYGGFPKSVCTSVNECMCHGIPDSRQLQNGDIINIDVTVYLDGYHGDTSKTFFCGEVSDELKNLVKVTEECLEKGIAACKDGALFRKIGKRISEHAEKYGYGVVERFVGHGVGTVFHSEPIIMHNRNEKAGRMIEGQTFTIEPILSMGSIDSITWPDNWTTITADGSPAAQFEHTILITKTGAEILTKC

SEQ ID NO: 162 - DNA, 1011 bp, Hordeum vulgare
  CDS (1)..(1011)
atggcggtcagagtccagtccatggagctgaaccgctccccgacgctcctctccggcggccgaggcaaaacatgcccgttcattatacaagcaaagagatcagggggattagagaaagcaaatacaaggtcgcaagcttctgaaaaactcaagaaaagagaacccctgacccgtgggattgttagtgcacctcttccggtaccaggccatatacctcgacctccttatgttggatcaaacaaaatgccagagatatcgagtgagagacaaatgcaggacaaagagagcatcgtgcacatgaaagcttcatgtgagcttgctgctcgtgttcttgaaaatgcagggaaattagtcaaaccttctgtaacaaccgacgaaattgataaagcagtgcacaagatgatcattgatgctggagcctatccatccccgcttggatacggcgggtttccaaaaagtgtatgcacatcagtgaacgaatgcatgtgccatggtattcctgattcacgagaactaaaggatggagacataataaacattgacgtcactgtctacttgaatggttttcatggggatacctctaaaacgtttttctgtggagaagttgacgaagctactaaaagacttgtgaaggttactgaagaatgcatgcttaggggcatatcagcctgcaaacatggtgtgagctttaagaaaattggcagaagaataagcgagcatgctgagaggcatggctttggtgttgtggagcaatttgttgggcatggagttggcagagtattccattcacagccaattatatatcaccagcgcaacaacatgccggggcagatggtagaaggccagacgttcacaatagagccgatcctgaccatgggacgcagcagcatcgagtgcgacatgtgggaggacggctggacggcggtgacgacggacggcagcctggcggcgcagttcgagcacaccatcctcatcaccaggaccggcgcggagatcctcaccaaatgctag

SEQ ID NO: 163 - protein, 336 aa, Hordeum vulgare
MAVRVQSMELNRSPTLLSGGRGKTCPFIIQAKRSGGLEKANTRSQASEKLKKREPLTRGIVSAPLPVPGHIPRPPYVGSNKMPEISSERQMQDKESIVHMKASCELAARVLENAGKLVKPSVTTDEIDKAVHKMIIDAGAYPSPLGYGGFPKSVCTSVNECMCHGIPDSRELKDGDIINIDVTVYLNGFHGDTSKTFFCGEVDEATKRLVKVTEECMLRGISACKHGVSFKKIGRRISEHAERHGFGVVEQFVGHGVGRVFHSQPIIYHQRNNMPGQMVEGQTFTIEPILTMGRSSIECDMWEDGWTAVTTDGSLAAQFEHTILITRTGAEILTKC

SEQ ID NO: 164 - DNA, 1026 bp, Zea mays
  CDS (1)..(1026)
atggctattggagtcccatccatggagctccaccgctcctcaccgttgctctcgggtggccgaggaggaaatacatgcctacagaagaagcccttctttgtccaagcaaagagactagtggggatggagaaagcaagtacgaggccaggaacacaagagtctggacagacaaagaaaagagcacccctggttcgtggaactgttagcccacctcttccagtaccaggaaacatacctcggcctccttatgtcggcacagaatatgtaccagagatagcaaaagagatacaaatgcatgacaaagagggcattgtccacatgagagctgcttgcgagctcgcggctcgtgttcttgactatgcaggaacgttagtgaaaccctctgtaacaacagacgaaattgataaagcagtgcacaagatgatcatcgatgctggagcctatccatcaccacttggatatggtgggtttccaaaaagtgtatgcacctcagtgaatgagtgcatgtgccatggaattcctgattcacgcgagctacaggatggagacataattaacattgatgtcactgtctacttgaatggttatcatggggatacctcaaaaacatttctttgtggagaagtcgatgaagccagtaaacgacttgtgaaggttactgaagagtgcttgctcaggggcatatcaacatgcaaacatggtaccagctttaagaagattggcagaagaataagtgagcatgctgagaggaacggttttggtgttgtggagtgttttgttgggcatggagtcggcagggtatttcactcagaaccaattatctatcaccagaggaacaacagaccgggccagatgattgaagggcagactttcacaatagagccgatcatatccatggggagcatcgagtgcgacatgtgggacgacggctggactgccgtgacgacggacggcagcttggcggcgcagttcgagcacaccatactgatcaccaggaccggagccgagatcctcaccaagtgctag

SEQ ID NO: 165 - protein, 341 aa, Zea mays; identical to SEQ ID NO: 121

SEQ ID NO: 166 - DNA, 1035 bp, Triticum aestivum
  CDS (1)..(1035)
atggcggtcagagttccgtccatggagctgaaccgctccccgccgctcctctccggcggcagaggcaaaacatgccttcagaagcctttcattgtccaagcaaagagatcaggtggattggagaaagcaaatactaggtcacgaggaccgcaagcttctgaaaaactcaagaaaagagaacccctgactcgtgggactgttagtgcgcctcttccggtaccaggacacatacctcgacctccttacgttggatcaaacaaaatgcccgagatatcgagtgagagacaaatgcaggacaaagacaccatcgtgcacatgaaagctgcatgtgagcttgctgctcgtgttcttcaaaatgcagggaaattagtcaaaccctctgtaacaacagacgaaattgataaagcagtgcacaagatgatcatcgatgctggagcctatccatccccgcttggatacggtgggtttccaaaaagtgtatgcacatcagtgaacgaatgcatgtgccatggtattcctgattcacgagaactaaaggatggagacataattaacatcgatgtcactgtctacttgaacggttttcatggagatacctctaaaacattcttctgtggagaagttgacgaagctgctaaaagacttgtgaaggttactgaagagtgcatgcttaggggcatatcatcctgcaaacatggtgtgagctttaagaaaattggcagaagaataagcgagcatgctgagaagcatggatttggtgtcgtggagcaatttgttgggcatggagttggcagagtttttcattcacaaccgattatatatcaccagcgcaacaacatgccggggcagatggtggaagggcagacattcacaatagagccgatcctgaccatgggaagcaacagcaacagcatcgagtgcgacatgtgggaggacggctggacggcggtgacgacggacggcagcctggcggcgcagttcgagcacaccatcctcatcaccaggaccggcgcagagatcctaaccaaatgctag

SEQ ID NO: 167 - protein, 344 aa, Triticum aestivum
MAVRVPSMELNRSPPLLSGGRGKTCLQKPFIVQAKRSGGLEKANTRSRGPQASEKLKKREPLTRGTVSAPLPVPGHIPRPPYVGSNKMPEISSERQMQDKDTIVHMKAACELAARVLQNAGKLVKPSVTTDEIDKAVHKMIIDAGAYPSPLGYGGFPKSVCTSVNECMCHGIPDSRELKDGDIINIDVTVYLNGFHGDTSKTFFCGEVDEAAKRLVKVTEECMLRGISSCKHGVSFKKIGRRISEHAEKHGFGVVEQFVGHGVGRVFHSQPIIYHQRNNMPGQMVEGQTFTIEPILTMGSNSNSIECDMWEDGWTAVTTDGSLAAQFEHTILITRTGAEILTKC

SEQ ID NO: 168 - DNA, 1026 bp, Zea mays
  CDS (1)..(1026)
atggctattggagtcccatccatggagctccaccgctcctcaccgttgctctcgggtggccgaggaggaaatacatgcctacagaagaagcccttctttgtccaagcaaagagactagtggggatggagaaagcaagtacgaggccaggaacacaagagtctggacagacaaagaaaagagcacccctggttcgtggaactgttagcccacctcttccagtaccaggaaacatacctcggcctccttatgtcggcacagaatatgtaccagagatagcaaaagagatacaaatgcatgacaaagagggcattgtccacatgagagctgcttgcgagctcgcggctcgtgttcttgactatgcaggaacgttagtgaaaccctctgtaacaacagacgaaattgataaagcagtgcacaagatgatcatcgatgctggagcctatccatcaccacttggatatggtgggtttccaaaaagtgtatgcacctcagtgaatgagtgcatgtgccatggaattcctgattcacgcgagctacaggatggagacataattaacattgatgtcactgtctacttgaatggttatcatggggatacctcaaaaacatttctttgtggagaagtcgatgaagccagtaaacgacttgtgaaggttactgaagagtgcttgctcaggggcatatcaacatgcaaacatggtaccagctttaagaagattggcagaagaataagtgagcatgctgagaggaacggttttggtgttgtggagtgttttgttgggcatggagtcggcagggtatttcactcagaaccaattatctatcaccagaggaacaacagaccgggccagatgattgaagggcagactttcacaatagagccgatcatatcgatggggagcatcgagtgcgacatgtgggacgacggctggactgccgtgacgacggacggcagcttggcggcgcagttcgagcacaccatactgatcaccaggaccggagccgagatcctcaccaagtgctag

SEQ ID NO: 169 - protein, 341 aa, Zea mays; identical to SEQ ID NO: 121

SEQ ID NO: 170 - DNA, 1053 bp, Zea mays
  CDS (1)..(1053)
atggctgctggactgggagcgcgcccctccgccaccttcgtggccggaaggttccggcctctcgctgcccctctccgccccgtccgctccggcaagttcgttgtgccaaagcgatgcttcattgtatcaagcaggcttgcatgggtggaagatgagcttatggagatacaaaagtcacaagagcaaagttcagtaaaatcaaagaaaaggccacctttgaggcgtggaaaggtctccccacaacttcctgtaccagggcacattccaagaccatcttatgttggtgcgaaaggattgcctgaactatgcaagggccaattacatgatgctcaaggaattactggaatgagagctgcttgcaaacttgctgcccgtgttcttgacttcgctgggactttagttaagccatccattactacaaatgaaattgacgcagcagtccataatatgatcattgaggctggtgcttatccttctccacttggctatcatggatttcctaagagtatatgtacatcagtaaatgagtgtgtctgtcatggggtacctgattcaactcagctgcagaatggggatattataaatattgatgtaaatgtgttcctgaatggataccatgggggtacctccagaacatttgcatgtggacaagtggatgattctatcaaacattttctcaatgcagctgaagaatgcttggagaaaggcatttctatctgcagggatggtgtgaactacagaaagattggcaagaaaataagcaagcttgcctatttttatggctattatgtggtggaacgctttgttgggcatgggattggaactatgtatcattctgagccactaattctacatcatgccaacgaaaactcagggcgtatggttgagggccaaacatttacaattgaacctatactcacaatggagaaaacagagtgtgttacatgggaagatggatggacgactgtcactgctgatggtagctgggctgcgcagtttgagcataccatactggtgactagggacggtgcagaaatactgacgaaagtctga

SEQ ID NO: 171 - protein, 350 aa, Zea mays; identical to SEQ ID NO: 149

SEQ ID NO: 172 - DNA, 1026 bp, Zea mays
  CDS (1)..(1026)
atggctattggagtcccatccatggagctccaccgctcctcaccgttgctctcgggtggccgaggaggaaatacatgcctacagaagaagcccttctttgtccaagcaaagagactagtggggatggagaaagcaagtacgaggccaggaacacaagagtctggacagacaaagaaaagagcacccctggttcgtggaactgttagcccacctcttccagtaccaggaaacatacctcggcctccttatgtcggcacagaatatgtaccagagatagcaaaagagatacaaatgcatgacaaagagggcattgtccacatgagggctgcttgcgagctcgcggctcgtgttcttgactatgcaggaacgttagtgaaaccctctgtaacaacagacgaaattgataaagcagtgcacaagatgatcatcgatgctggagcctatccatcaccacttggatatggtgggtttccaaaaagtgtatgcacctcagtgaatgagtgcatgtgccatggaattcctgattcacgcgagctacaggatggagacataattaacattgatgtcactgtctacttgaatggttatcacggggatacctcaaaaacatttctttgtggagaagtcgatgaggccagtaaacgacttgtgaaggttactgaagagtgcttgctcaggggcatatcaacatgcaaacatggtaccagctttaagaagattggcagaagaataagtgagcatgctgagaggaacggttttggtgttgtggagtgttttgttgggcatgtagtcggcagggtatttcactcagaaccaattatctatcaccagaggaacaacagaccgggccagatgattgaagggcagactttcacaatagagccgatcatatcgatggggagcatcgagtgcgacatgtgggacgacggctggactgccgtgacgacggacggcagcttggcggctcagttcgagcacaccatactgatcaccaggaccggagccgagatcctcaccaagtgctag

SEQ ID NO: 173 - protein, 341 aa, Zea mays
MAIGVPSMELHRSSPLLSGGRGGNTCLQKKPFFVQAKRLVGMEKASTRPGTQESGQTKKRAPLVRGTVSPPLPVPGNIPRPPYVGTEYVPEIAKEIQMHDKEGIVHMRAACELAARVLDYAGTLVKPSVTTDEIDKAVHKMIIDAGAYPSPLGYGGFPKSVCTSVNECMCHGIPDSRELQDGDIINIDVTVYLNGYHGDTSKTFLCGEVDEASKRLVKVTEECLLRGISTCKHGTSFKKIGRRISEHAERNGFGVVECFVGHVVGRVFHSEPIIYHQRNNRPGQMIEGQTFTIEPIISMGSIECDMWDDGWTAVTTDGSLAAQFEHTILITRTGAEILTKC

SEQ ID NO: 174 - DNA, 1053 bp, Zea mays
  CDS (1)..(1053)
atggctgctggactgggagcgcgcccctccgccaccttcgaggccggaaggttccggcctctcgctgcccctctccgccccgtccgctccggaaaattcgtagtgcctaagcgatgcttcactgtgtcaagtaggcttgcatgggtggaagatgagcttatggagataaaaaagtcacaagagcaaagttcagtaaaatcaaagaaaagaccacctttgaggcgtggaaaggtctccccacaacttcctgtaccagggcacattccaagaccatcttatgttggttcaaaaggattgccagaactatgcaagggccaattacacgatgctcaaggaattgctggaatgagagctgcttgcaaacttgctgcccgtgttcttgattttgctgggactttagttaagccatccattactacaaatgaaattgacgaagcagtccataatatgatcattgaagctggtgcttatccttctccacttggctatcatggatttcctaaaagtatatgtacatcagtaaatgagtgtgtctgtcatggggtacctgattcaactcagctgcagaatggggatattataaatattgatgtaaatgtgttcctgaatggataccatgggggtacctccagaacatttgcatgtggacaagttgatgattctatcaaacattttctcaatgcagctgaagaatgcttggagaaaggcatttctatctgcagggatggtgtgaactacagaaagattggcaagaaaataagcaagcttgcctatttttatggctattatgtggtggaacgctttgttggccatgggattggaactatgtatcattctgagccacttatcctacatcatgccaacgaaaactcagggcgtatggttgagggccaaacatttacaattgaacctatactcacaatggagaaaacagagtgtgttacatgggaagatggatggacgactgtcactgctgatggtagctgggctgcgcagtttgagcataccatactggtgactagggacggtgcagaaatactgacgaaagtttga

SEQ ID NO: 175 - protein, 350 aa, Zea mays; identical to SEQ ID NO: 119

SEQ ID NO: 176 - DNA, 28 bp, Artificial sequence
  primer
atagagctcactctgctcttcctttcac

SEQ ID NO: 177 - DNA, 32 bp, Artificial sequence
  primer
atacccgggaatacaccagactcaacataagg

SEQ ID NO: 178 - DNA, 23 bp, Artificial sequence
  primer
atggcgtcttcggtttttctatc

SEQ ID NO: 179 - DNA, 23 bp, Artificial sequence
  primer
ttagcatttggtaagaatctctg

SEQ ID NO: 180 - DNA, 28 bp, Artificial sequence
  primer
ataccatggactctgctcttcctttcac

SEQ ID NO: 181 - DNA, 34 bp, Artificial sequence
  primer
atattaattaaaatacaccagactcaacataagg

SEQ ID NO: 182 - DNA, 28 bp, Artificial sequence
  primer
ataggtaccactctgctcttcctttcac

SEQ ID NO: 183 - DNA, 32 bp, Artificial sequence
  primer
atagtcgacaatacaccagactcaacataagg

SEQ ID NO: 184 - protein, 310 aa, Artificial sequence
  consensus sequence
  Variant (2)..(3): Xaa in position 2 to 3 is any amino acid
  Variant (5)..(5): Xaa in position 5 is any amino acid
  Variant (9)..(9): Xaa in position 9 is any amino acid
  Variant (11)..(11): Xaa in position 11 is any amino acid
  Variant (14)..(15): Xaa in position 14 to 15 is any amino acid
  Variant (17)..(17): Xaa in position 17 is any amino acid
  Variant (23)..(27): Xaa in position 23 to 27 is any amino acid
  Variant (28)..(28): Xaa in position 28 is any or no amino acid
  Variant (30)..(37): Xaa in position 30 to 37 is any amino acid
  Variant (38)..(38): Xaa in position 38 is any or no amino acid
  Variant (40)..(41): Xaa in position 40 to 41 is any amino acid
  Variant (44)..(45): Xaa in position 44 to 45 is any amino acid
  Variant (49)..(51): Xaa in position 49 to 51 is any amino acid
  Variant (55)..(55): Xaa in position 55 is any amino acid
  Variant (58)..(59): Xaa in position 58 to 59 is any amino acid
  Variant (65)..(65): Xaa in position 65 is any amino acid
  Variant (67)..(68): Xaa in position 67 to 68 is any amino acid
  Variant (71)..(71): Xaa in position 71 is any amino acid
  Variant (75)..(75): Xaa in position 75 is any amino acid
  Variant (79)..(79): Xaa in position 79 is any amino acid
  Variant (83)..(84): Xaa in position 83 to 84 is any amino acid
  Variant (94)..(94): Xaa in position 94 is any amino acid
  Variant (108)..(108): Xaa in position 108 is any amino acid
  Variant (117)..(117): Xaa in position 117 is any amino acid
  Variant (119)..(120): Xaa in position 119 to 120 is any amino acid
  Variant (133)..(133): Xaa in position 133 is any amino acid
  Variant (134)..(157): Xaa in position 134 to 157 is any or no amino acid
  Variant (165)..(165): Xaa in position 165 is any amino acid
  Variant (168)..(168): Xaa in position 168 is any amino acid
  Variant (171)..(171): Xaa in position 171 is any amino acid
  Variant (174)..(176): Xaa in position 174 to 176 is any amino acid
  Variant (178)..(178): Xaa in position 178 is any amino acid
  Variant (181)..(181): Xaa in position 181 is any amino acid
  Variant (184)..(184): Xaa in position 184 is any amino acid
  Variant (188)..(190): Xaa in position 188 to 190 is any amino acid
  Variant (192)..(193): Xaa in position 192 to 193 is any amino acid
  Variant (195)..(196): Xaa in position 195 to 196 is any amino acid
  Variant (198)..(201): Xaa in position 198 to 201 is any amino acid
  Variant (205)..(206): Xaa in position 205 to 206 is any amino acid
  Variant (208)..(209): Xaa in position 208 to 209 is any amino acid
  Variant (212)..(217): Xaa in position 212 to 217 is any amino acid
  Variant (220)..(221): Xaa in position 220 to 221 is any amino acid
  Variant (229)..(230): Xaa in position 229 to 230 is any amino acid
  Variant (233)..(234): Xaa in position 233 to 234 is any amino acid
  Variant (236)..(236): Xaa in position 236 is any amino acid
  Variant (238)..(238): Xaa in position 238 is any amino acid
  Variant (240)..(240): Xaa in position 240 is any amino acid
  Variant (243)..(245): Xaa in position 243 to 245 is any amino acid
  Variant (246)..(247): Xaa in position 246 to 247 is any or no amino acid
  Variant (249)..(249): Xaa in position 249 is any amino acid
  Variant (251)..(253): Xaa in position 251 to 253 is any amino acid
  Variant (261)..(261): Xaa in position 261 is any amino acid
  Variant (263)..(264): Xaa in position 263 to 264 is any amino acid
  Variant (266)..(271): Xaa in position 266 to 271 is any amino acid
  Variant (272)..(275): Xaa in position 272 to 275 is any or no amino acid
  Variant (277)..(277): Xaa in position 277 is any amino acid
  Variant (279)..(279): Xaa in position 279 is any amino acid
  Variant (282)..(282): Xaa in position 282 is any amino acid
  Variant (285)..(285): Xaa in position 285 is any amino acid
  Variant (289)..(290): Xaa in position 289 to 290 is any amino acid
  Variant (301)..(302): Xaa in position 301 to 302 is any amino acid
  Variant (309)..(309): Xaa in position 309 is any amino acid
LXXGXVSPXLXVPXXIXRPPYVXXXXXXPXXXXXXXXXDXXGIXXMRAXXXLAAXVLXXAGTLVXPXXTTXEIDXAVHXMIIXXGAYPSPLGYXGFPKSVCTSVNECXCHGIPDSRXLXXGDIINIDVTVYLXXXXXXXXXXXXXXXXXXXXXXXXXGYHGDTSXTFXCGXVDXXXKXLVXVTXECLXXXIXXCXXGXXXXKIGXXIXXHAXXXXXXVVXXFVGHGVGXXFHXXPXIXHXRNXXXXXGXMXXXQTFTIEPXLXXGXXXXXXXXXXWXDXWTXVTXDGSXXAQFEHTILITXXGAEILTXC

SEQ ID NO: 185 - protein, 60 aa, Artificial sequence
  protein pattern
  Variant (3)..(3): Xaa in position 3 is any amino acid
  Variant (7)..(7): Xaa in position 7 is Asp or Glu
  Variant (8)..(8): Xaa in position 8 is Ala or Asn
  Variant (18)..(18): Xaa in position 18 is any amino acid
  Variant (19)..(19): Xaa in position 19 is Gly or Ser
  Variant (20)..(20): Xaa in position 20 is Phe or Tyr
  Variant (24)..(24): Xaa in position 24 is Ile or Val
  Variant (32)..(32): Xaa in position 32 is Ile, Met or Val
  Variant (36)..(36): Xaa in position 36 is Ile or Val
  Variant (38)..(38): Xaa in position 38 is Asp or Glu
  Variant (40)..(41): Xaa in position 40 to 41 is any amino acid
  Variant (43)..(43): Xaa in position 43 is any amino acid
  Variant (44)..(44): Xaa in position 44 is Asp, Asn or Ser
  Variant (53)..(53): Xaa in position 53 is Asn or Thr
  Variant (55)..(55): Xaa in position 55 is Phe or Tyr
  Variant (57)..(57): Xaa in position 57 is Asp or Asn
  Variant (59)..(59): Xaa in position 59 is Phe or Tyr
VHXMIIXXGAYPSPLGYXXXPKSXCTSVNECXCHGXPXSXXLXXGDIINIDVXVXLXGXH

SEQ ID NO: 186 - protein, 30 aa, Artificial sequence
  protein pattern
  Variant (2)..(2): Xaa in position 2 is any amino acid
  Variant (3)..(3): Xaa in position 3 is any or no amino acid
  Variant (5)..(6): Xaa in position 5 to 6 is any amino acid
  Variant (7)..(7): Xaa in position 7 is any or no amino acid
  Variant (11)..(11): Xaa in position 11 is any amino acid
  Variant (14)..(14): Xaa in position 14 is any amino acid
  Variant (15)..(15): Xaa in position 15 is Phe or Tyr
  Variant (19)..(19): Xaa in position 19 is Leu or Met
  Variant (21)..(21): Xaa in position 21 is Glu, Lys or Arg
  Variant (23)..(23): Xaa in position 23 is any amino acid
  Variant (24)..(24): Xaa in position 24 is Ile or Val
  Variant (27)..(27): Xaa in position 27 is Asp or Asn
MXXAXXXLAAXVLXXAGTXVXPXXTTXEID

SEQ ID NO: 187 - protein, 29 aa, Artificial sequence
  protein pattern
  Variant (3)..(3): Xaa in position 3 is Glu or Arg
  Variant (4)..(4): Xaa in position 4 is any amino acid
  Variant (10)..(10): Xaa in position 10 is Ile or Val
  Variant (12)..(12): Xaa in position 12 is any amino acid
  Variant (13)..(13): Xaa in position 13 is Met or Val
  Variant (14)..(14): Xaa in position 14 is Phe or Tyr
  Variant (16)..(16): Xaa in position 16 is Ala or Ser
  Variant (17)..(17): Xaa in position 17 is Asp, Glu or Gln
  Variant (19)..(19): Xaa in position 19 is Ile, Leu or Val
  Variant (20)..(20): Xaa in position 20 is Ile or Val
  Variant (21)..(21): Xaa in position 21 is any amino acid
  Variant (23)..(24): Xaa in position 23 to 24 is any amino acid
  Variant (26)..(26): Xaa in position 26 is Asp, Glu or Asn
  Variant (27)..(28): Xaa in position 27 to 28 is any amino acid
VVXXFVGHGXGXXXHXXPXXXHXXNXXXG

SEQ ID NO: 188 - protein, 38 aa, Artificial sequence
  protein pattern
  Variant (2)..(2): Xaa in position 2 is any or no amino acid
  Variant (5)..(5): Xaa in position 5 is Asp, Glu, Asn or Gln
  Variant (8)..(8): Xaa in position 8 is Asp or Glu
  Variant (9)..(10): Xaa in position 9 to 10 is any amino acid
  Variant (12)..(12): Xaa in position 12 is any amino acid
  Variant (13)..(13): Xaa in position 13 is any or no amino acid
  Variant (15)..(18): Xaa in position 15 to 18 is any amino acid
  Variant (19)..(19): Xaa in position 19 is any or no amino acid
  Variant (21)..(21): Xaa in position 21 is Cys or Ser
  Variant (22)..(22): Xaa in position 22 is Leu or Met
  Variant (23)..(23): Xaa in position 23 is any amino acid
  Variant (24)..(24): Xaa in position 24 is Lys or Arg
  Variant (25)..(25): Xaa in position 25 is Ala or Gly
  Variant (27)..(27): Xaa in position 27 is Ala or Ser
  Variant (28)..(28): Xaa in position 28 is any amino acid
  Variant (30)..(31): Xaa in position 30 to 31 is any amino acid
  Variant (33)..(33): Xaa in position 33 is Ala, Thr or Val
  Variant (34)..(34): Xaa in position 34 is Glu, Asn or Ser
  Variant (35)..(35): Xaa in position 35 is any amino acid
  Variant (36)..(36): Xaa in position 36 is Lys or Arg
  Variant (37)..(37): Xaa in position 37 is any amino acid
FXCGXVDXXXKXXLXXXXXEXXXXXIXXCXXGXXXXXI

SEQ ID NO: 189 - protein, 15 aa, Artificial sequence
  protein pattern
  Variant (2)..(2): Xaa in position 2 is Ile, Met or Val
  Variant (3)..(3): Xaa in position 3 is any amino acid
  Variant (4)..(4): Xaa in position 4 is Gly or Asn
  Variant (12)..(14): Xaa in position 12 to 14 is any or no amino acid
MXXXQTFTIEPXXXI

SEQ ID NO: 190 - DNA, 1578 bp, Arabidopsis thaliana
  CDS (1)..(1578)
atggagccagtagaagcttttaacgtatactacttgtggatgggtctcactaactttgctccactcctcggcgcattaatctccgacgcctacattggccgtttcaagaccatcgcttacgcatccctcttctcaattctaggactaatgacggtgacactcaccgcctgcctgcctcaactccacccaccaccgtgcaacaaccctcatccagacgaatgcgacgatccgaacaagctccagctcgggattctattcctcggtctcggctttctctccatcggtagcggcggaatccggccttgcagcattccattcggagttgatcagtttgaccaacgaacagagcaaggccttaaaggagtggccagtttctttaattggtactacttgaccttaactatggttctcatcttttcgcataccgttgtggtctacttacagactgtcagttgggtcatcgggtttagcatcccgactagtttaatggcttgtgcagtggttctgttctttgtcggtatgcggttttacgtatatgtcaaaccggaaggtagtgtattctctggtattgctcgggtcatcgtggcagctcgtaagaaacgggacctcaaaatttcgcttgtggacgatgggactgaggagtattatgagccgccggtgaaacctggcgtgttatccaagttacctcttactgaccaattcaagtttctggacaaagctgcggtgatactagacggtgatcttacatctgaaggagttccggcaaataagtggcggctatgtagcatccaagaagttgaagaggtcaagtgcctgatcagagttgttccggtttggtctgctggaataatttcaatcgttgcaatgaccacgcaagcaactttcatggtctttcaagctacaaaaatggatcgacacatgggtccacactttgagatcccggccgcctccataaccgtcatttcttacatcactataggcatttgggtgcctatctacgaacacctcttagtcccgttcctttggcgaatgagaaagttcagggtcactctccttcaacggatggggatagggatcgtcttcgccattctctccatgttcactgcagggtttgtagagggagtgaggcggacacgggctactgaaatgactcaaatgtcggtgttttggctggctttgccactgattctgatggggctctgcgagtcatttaatttcattggactgatcgagttcttcaacagtcagtttccagagcacatgagaagcatagcgaattcgctatttccactctcatttgctgcagctaattatctgagcagtctgctggtgaccaccgtgcataaagtctcaggcacaaaagaccaccctgactggctgaacaaggaccttgatagagggaagttggactacttctactatctgattgccgttttgggtgtggttaaccttgtgtatttctggtactgtgcccatagataccagtataaagccggttcgcaaattgaagatttcaatgaggagaagtctcttctagacatcgaaccaaaccagagacacgatcaatctccaagttag

SEQ ID NO: 191 - protein, 525 aa, Arabidopsis thaliana
MEPVEAFNVYYLWMGLTNFAPLLGALISDAYIGRFKTIAYASLFSILGLMTVTLTACLPQLHPPPCNNPHPDECDDPNKLQLGILFLGLGFLSIGSGGIRPCSIPFGVDQFDQRTEQGLKGVASFFNWYYLTLTMVLIFSHTVVVYLQTVSWVIGFSIPTSLMACAVVLFFVGMRFYVYVKPEGSVFSGIARVIVAARKKRDLKISLVDDGTEEYYEPPVKPGVLSKLPLTDQFKFLDKAAVILDGDLTSEGVPANKWRLCSIQEVEEVKCLIRVVPVWSAGIISIVAMTTQATFMVFQATKMDRHMGPHFEIPAASITVISYITIGIWVPIYEHLLVPFLWRMRKFRVTLLQRMGIGIVFAILSMFTAGFVEGVRRTRATEMTQMSVFWLALPLILMGLCESFNFIGLIEFFNSQFPEHMRSIANSLFPLSFAAANYLSSLLVTTVHKVSGTKDHPDWLNKDLDRGKLDYFYYLIAVLGVVNLVYFWYCAHRYQYKAGSQIEDFNEEKSLLDIEPNQRHDQSPS

SEQ ID NO: 192 - DNA, 2075 bp, Brassica napus
  CDS (150)..(1973)
gataagcccactctctacatttatcaatcacttaatgtgattgcctttatttatttagatatacaacaaaaagtgagaatcaaatctcccaacattagttccaccctttaaatcgaagttagagtattttacctgtatacatcttagagatggttttgatggatggaagggacggttcttcaccaccgcagccgaagatggatgctgttgattcgtacaatcaagaaagcccgtctgattctttttcggatgctgagaaggttgagaaaaagcgtggaggctggagagccgtcacgttcattttaggaaatgaaacgcttgagagactgggaacgattgggttgttgtcaaacttcatggtgtatctaaccagagtgttccatttagaacaagtcaaagctgcaaatgtcatcaacatttggtttggtttcaccaatctcacacctctcgtcggcgcttttatctcagacgcttacgtcggtcgtttcaagaccatcgctttcgcgtcattcgccaccctcctcggactagtgacattgacactcacagcatcgcttcctcaactccacccagcaacatgcattagcaaagactcagtcagttgcagcggtccgaacaagctccagttcgggactctgttcttaggtctcgttttcctttcaatagggacaggaggaataaggccatgtagcatcccttttggagctgaccagtttgaccaacgaacagaggaaggtgttaatggagtggctagtttcttcaactggtattacctgactttcactgtggttctgcttattacacagaccgtcgttgtgtatattcaggatcaagtcagctggatcatcggctttagtatccctactggactcatggcttgtgcgctggttatttttttcgctggaatgaagctttacatctatgttaaacctgaaggaagtatattctccagtatcgctcaagttatcgtggcagctcgtaagaagcgaaagatgaagctctcggcggaagatgacggcacagtgacctactatgaccctcccgttaaagatagcgttttacacaagttacaccgaagtaaccaattcagatttctagataaagcggcggtaataaaagaaggtgatctaacatccgagggagttccagcgaacaagtggcggctatgcagcattcaagaagtagaggaagtaaagtgtttgatccgaatagttcctgtttggtcggccggaataatatcactcatggcaatgtcacaacaaggaacattcacggtctctcaagctttgaaaatggaccgacacatgggtcctaaattcgaggctccggccggttctctctccgtcatctctctcctcaccatcggcatctttcttcccatatacgaccgagttttagtcccgttcctccgccgcatcaccggccataaatcaggtatcacacgcctccaacgtatcgggacagggatcgttttcgcgatcctttccatgatcgttgccggcctcgtggagagagtgagacgcacacgctccatcaagtccggtgatcctaccggtatgactcccatgtccgtgttttggctctcgccacagctaattctgatgggactatgtgaagcattgaatataataggacagatagagttcttcaacagtcagtttccggatcacatgagaagcatagctaatgctctcttctctttgtcctttgccggttcgagctatcttagcagttttctagtcacggttgttcataaattctccggtggtcatgaccgtcctgattggctagacaagaatctcaacgcggggaaattggattacttctattatctgatcgcgattttgggtgtggttaatctggtttatttttggtattgtgctcgaggataccggtacaaggtcggcttgggagatttcaaggaggagaagagttattctgatgttgagatgacttccaaaagcaacaattgatcgatgctgtttcaatgtttatcatacatatgacaatgtttcttacaatgtgtaagaactaaattatataataaaatataaccctttaaaaaaaaaaaaaaa

SEQ ID NO: 193 - protein, 607 aa, Brassica napus
MVLMDGRDGSSPPQPKMDAVDSYNQESPSDSFSDAEKVEKKRGGWRAVTFILGNETLERLGTIGLLSNFMVYLTRVFHLEQVKAANVINIWFGFTNLTPLVGAFISDAYVGRFKTIAFASFATLLGLVTLTLTASLPQLHPATCISKDSVSCSGPNKLQFGTLFLGLVFLSIGTGGIRPCSIPFGADQFDQRTEEGVNGVASFFNWYYLTFTVVLLITQTVVVYIQDQVSWIIGFSIPTGLMACALVIFFAGMKLYIYVKPEGSIFSSIAQVIVAARKKRKMKLSAEDDGTVTYYDPPVKDSVLHKLHRSNQFRFLDKAAVIKEGDLTSEGVPANKWRLCSIQEVEEVKCLIRIVPVWSAGIISLMAMSQQGTFTVSQALKMDRHMGPKFEAPAGSLSVISLLTIGIFLPIYDRVLVPFLRRITGHKSGITRLQRIGTGIVFAILSMIVAGLVERVRRTRSIKSGDPTGMTPMSVFWLSPQLILMGLCEALNIIGQIEFFNSQFPDHMRSIANALFSLSFAGSSYLSSFLVTVVHKFSGGHDRPDWLDKNLNAGKLDYFYYLIAILGVVNLVYFWYCARGYRYKVGLGDFKEEKSYSDVEMTSKSNN

SEQ ID NO: 194 - DNA, 2011 bp, Glycine max; identical to SEQ ID NO: 71
  CDS (68)..(1825)

SEQ ID NO: 195 - protein, 585 aa, Glycine max; identical to SEQ ID NO: 72

SEQ ID NO: 196 - DNA, 1986 bp, Brassica napus
  CDS (61)..(1815)
aagagagtaaatagattcatcaagattaaggaatctttctggtcgaagcaggggaaaacgatgggttccattgaagaagaagaagcgcctctcatcgaacaaggtttaatctcacaggcaccgaaactgtatgctgaagatggttcagtagaccttcatgggaacccaccattgaaggctaaaacaggaaactggaaagcttgccctttcattctcggcaatgagtgctgcgagaggctagcttactatggcatcgccgggaacctaatcacttacctcaccaccaaactacaccaaggaaacgtctccgctgctacaaacgtcaccacatggcaaggcacttgctatctcacccctctcatcggtgctgtcttagccgatgcttactggggtcgttactggaccatcgcttgtttctccggcatttacttcatcggcatgtcggcgctaactctctcagcttcagttccagcactgaagccagcagaatgccttggcaccttctgtccttcagcaacgccagctcagtacgcaatgttcttcagcgggctttacctgatcgccctcggcactggaggcatcaaaccatgcgtctcatccttcggtgcagaccagttcgacgacactgactcccgtgaacgagtcagaaaagcttccttcttcaactggttttacttctccatcaacattggagcgctcgtgtcctctagtcttctagtttggatccaagagaatcgcggatggggtttagggtttggtataccgacagtgttcatgggtctagccattgtgagtttcttcttcggcacgccgctttacaggtttcaaaagcctggaggcagtcccataactcgcatctcccaagtcgtggtcgcttccttccgtaaatcgactctcaaagtccctgaagacgctgcacttttgtatgaaacgcaggacaagaactctgctattgctggaagtagaaagatcgaacataccgatgattgcaagtatcttgacaaagctgctgttatttcagatgaagaatccaaatcaggagacttttcaaactcgtggagactatgcacggtcactcaagtcgaagaactcaagattctgatccgtatgttcccaatatgggcctctggtatcatcttctcagccgtatacgctcagatgtcaacaatgtttgttcagcaaggtcgagccatggactgcaagatcggctccttccagcttcctccagcggcactagggacattcgacaccgctagcgtcatcatctgggttccgctctacgataggttcatcgtccccttggctagacgcttcactggagtagacaaagggttcacagagatacagagaatgggaatagggctgttcgtctctgttctatgcatggcggctgcagctatcattgagatcatcaggctccgtttaaccgacgagctcgggttggttgagtctggagctccggttcctatatccgtgttgtggcagattccgcagtacttcatcctcggtgcggcggaagtgttttacttcattggccagcttgagtttttctatgatcagtctccagatacgatgaggagcttgtgcagtgctttggctcttttgaccaatgctcttgggaactacttgagttcgttgatcctcacgcttgtgacttacttcacgacgaggaatggtggtgaaggttggatctcggataatctgaatacgggtcatctcgattacttcttctggcttttggctggtcttagtcttgtcaacatggcggtttacttcttctctgcggctaagtataagcagaagaaggcttcgtagtgagaatctgtgtttcgtctctccgttctttacaaacaaagtttgtcttcttttcatgtgtaattgtgtgtattttatttttaatacctttgctttcagtttcaaaagtttgcacatgcatttgcaatataaatctactaaaccgataaccatcttaaaaaaaaaaaaaaa

SEQ ID NO: 197 - protein, 584 aa, Brassica napus
MGSIEEEEAPLIEQGLISQAPKLYAEDGSVDLHGNPPLKAKTGNWKACPFILGNECCERLAYYGIAGNLITYLTTKLHQGNVSAATNVTTWQGTCYLTPLIGAVLADAYWGRYWTIACFSGIYFIGMSALTLSASVPALKPAECLGTFCPSATPAQYAMFFSGLYLIALGTGGIKPCVSSFGADQFDDTDSRERVRKASFFNWFYFSINIGALVSSSLLVWIQENRGWGLGFGIPTVFMGLAIVSFFFGTPLYRFQKPGGSPITRISQVVVASFRKSTLKVPEDAALLYETQDKNSAIAGSRKIEHTDDCKYLDKAAVISDEESKSGDFSNSWRLCTVTQVEELKILIRMFPIWASGIIFSAVYAQMSTMFVQQGRAMDCKIGSFQLPPAALGTFDTASVIIWVPLYDRFIVPLARRFTGVDKGFTEIQRMGIGLFVSVLCMAAAAIIEIIRLRLTDELGLVESGAPVPISVLWQIPQYFILGAAEVFYFIGQLEFFYDQSPDTMRSLCSALALLTNALGNYLSSLILTLVTYFTTRNGGEGWISDNLNTGHLDYFFWLLAGLSLVNMAVYFFSAAKYKQKKAS

SEQ ID NO: 198 - DNA, 2372 bp, Glycine max
  CDS (243)..(2033)
gtagatatttctcttttgtaaaagtgcatgttatacacagtgtataccccactttttggcttagtctgatatcttcaccgttcacgccaaccttcattgatctatatattgagctctctcactctcccctctctactctgtaactttgcttcttctattcacctcaataaacaacccttcctctgcttcagtgccctcccctgccttttcagctaactttttcttttaatatcatatcactcatgtcttacttagagtctcaggtctacaaagagagaaagtttgaagaagaatcagaagaggtcactcttgatgggagtgttgatttccatggacgtcctgcaatcagagccaaatctggcagatgggtggctgcaattatcatcctcttgaaccaagctctggcaactcttgcattttttgggattggagtgaacctagtgttgtttctgacaagggtggtaggacaaaacaatgctgatgcagccaacaatgtgagcaagtggaccggaactgtttacatcttctctctagtgggtgctttcctcagtgattcttattggggaagatataaaacttgtgctgtctttcaggtcatatttgttataggtctaatgtccttatccctttcatcatacctattcttgcttaagcctaaaggttgtggtaatgaatcagttaattgtgggaaacattcaaaattggagatggggatgttctacctctcaatctatcttgttgccttggggaatggaggttatcaaccaaatattgccacatttggggcagatcagtttgacgaggagcactcaaaggagggtcacaataaggtggccttctttagctacttctacctagcttttaacattggccaactcttctcgaacaccattctggtctattttgaggacgaaggaatgtgggctcttggtttctggctgtctgcaggctccgcctttgctgcattggtcttgtttcttgtatgcaccccaaggtatagacacttcaagcctagtggcaaccctctctccaggttcagccaagtccttgtggctgcatcaaggaaatccaaagttcaaatgtcatcaaacggagaggacttattcaacatggatgcaaaggaggcttccaacaatgccaatagaaagattctccacactcacgggttcaagttcttggatagggcagcgtttatatcttcaagagatctaggggaccagaaagggctcggttacaacccctggcatctctgtcctgtaagtcaagttgaagaagtgaagtgcatactgagactacttccaatctggctctgcaccataatatactcggtggttttcacacaaatggcttcactttttgtggagcaaggtgctgccatgaaaaccaaggtttccaacttcagaataccaccagctagcatgtccagctttgacatcctcagtgtggctgttttcattttcttttaccgtcgagttcttgatccgtttgtgggaaaacttaaaaagacagattctaagggacttacagaacttcagagaatgggagttggacttgttatagctgtactggcaatggtttcggctggattagttgaatgctataggctcaagtatgcaaaacaaggatgcatccactgcaatgactcgagcactttaagcatcttctggcaaatccctcagtatgcatttataggagcttccgaggtttttatgtacgtaggccagttggagttcttcaatgctcagacaccagacggcttgaagagctttggaagtgctctttgcatgacatccatttcccttgggaactatgtgagtagcttacttgttagtgtggttatgaagatatccaccgaagatcacatgccggggtggatccctggaaacctcaacaaaggtcacttagatagattttacttcctcttagctgccttgacatcgatagacttgattgcttatattgcatgtgcaaaatggtacaagtctatacagctagaggcaaacactggagagattgatgagccagaagtataattagcatgagacgtcattcaaaggcaatggttacagcatatattaataaaagaaagaagggagcaattagtcaaaataatcttggttacagttgctgttggaagaaatagtttgcaggattgcagaatgaagcccttcttacacgagtttctgcctctgttacaacttgacttactgtttttatggcttaaatatgttcttgaagcccagttgtgtaaaactaaacttagacgagacaatgactgttttagggtctctagaaacctcctttctttctgatttgtaagttcaattgttaagtttgaaattaagtatgatatgtggaaaaaaaaaaaaaaa

SEQ ID NO: 199 - protein, 596 aa, Glycine max
MSYLESQVYKERKFEEESEEVTLDGSVDFHGRPAIRAKSGRWVAAIIILLNQALATLAFFGIGVNLVLFLTRVVGQNNADAANNVSKWTGTVYIFSLVGAFLSDSYWGRYKTCAVFQVIFVIGLMSLSLSSYLFLLKPKGCGNESVNCGKHSKLEMGMFYLSIYLVALGNGGYQPNIATFGADQFDEEHSKEGHNKVAFFSYFYLAFNIGQLFSNTILVYFEDEGMWALGFWLSAGSAFAALVLFLVCTPRYRHFKPSGNPLSRFSQVLVAASRKSKVQMSSNGEDLFNMDAKEASNNANRKILHTHGFKFLDRAAFISSRDLGDQKGLGYNPWHLCPVSQVEEVKCILRLLPIWLCTIIYSVVFTQMASLFVEQGAAMKTKVSNFRIPPASMSSFDILSVAVFIFFYRRVLDPFVGKLKKTDSKGLTELQRMGVGLVIAVLAMVSAGLVECYRLKYAKQGCIHCNDSSTLSIFWQIPQYAFIGASEVFMYVGQLEFFNAQTPDGLKSFGSALCMTSISLGNYVSSLLVSVVMKISTEDHMPGWIPGNLNKGHLDRFYFLLAALTSIDLIAYIACAKWYKSIQLEANTGEIDEPEV

SEQ ID NO: 200 - DNA, 2082 bp, Glycine max; identical to SEQ ID NO: 29
  CDS (66)..(1826)

SEQ ID NO: 201 - protein, 586 aa, Glycine max; identical to SEQ ID NO: 30

SEQ ID NO: 202 - DNA, 2059 bp, Glycine max
  CDS (81)..(1772)
gaattcccgggtcgacttcgctgtcgacgatttcgtttcaatattccttatttttggcgaagtcgtattgactattgaagatggccattgacgacctctgcggcgattctgaagctgaaactccgctgctatcggagacgctatacggcgtcgtcaacttcaagggcctccccgtcctacgatctacctctggtggttggaaagctgctgccttcattataactgtggaagtggctgagagatttgcttactatggaatcaactcgaacctgataaattatttgacggggccacttggtcaatccacggtaacggcagcagagaacgtcaacctctggtctggaacagcgtcattacttcctcttctcggcgcttttcttgctgattcttttcttggtcgttaccgcaccatcgttttagcttcccttatttatgttctgggactgagcctgctgacgttttcgactatacttcctgtgacaacctcggacggcgaagttgctcgtccccaattaatattcttcttcttttctctatatctcgttgcacttgcacaaggtggacataagccttgtgttcaggcttttggagctgatcagtttgatgtgaacgatcctgaggaatgcaaggccagaagctcctttttcaattggtggtattttgccttcagtgctggtctttttgtgactcttttcatcttgaactatgtccaggataatgtcggttgggttcttggatttggaatcccttgcattgcaatgctaactgcattggttattttcttaattggaacttggacttaccggtttagcattcggagggaggaacgaggcccttttttgaggattggtagggtgtttattgttgcagtgaacaattggcgaattaccccttcagctgtcacttctgaagaggaagcttgtggcactctgccttgccatggttctgatcaatttagtttcctgaacaaagcattaattgcatcaaacggttcaaaggaagagggggaagtttgtagtgctgctgaagttgaagaagcaaaggcagtcctcaggcttgttccaatatgggctacatgtttaatttttgctattgtgtttgctcagtcttctactttctttacaaaacaaggtgttacgatggacagggaaattttgcctgggttttatgtaccccctgcttctcttcaatccattatcagcctctccattgttctttttattcctatctatgaccgcattattgttcccgtagctagagcttttactggcaaaccctctggcatcacaatgctgcagagaattggaactggaatgcttctttctgcaatttctatggtaattgcagcttttgtggagatgaaaagactcaaagtggctcgtgactgtgggctaattgacatgcctaatgtgacaattccaatgagcatctggtggttagttcctcaatatgccttgtttggaattgctgatgtctttgcaatggtgggtctgcaagagtttttctatgatcaagtcccacaggaattaagaagtgtgggtctttctctctatctaagtatttttggggtcgggagctttctgagtggctttctcatctctgctattgaaaatgtcacgggtaaagataatcgtcatagctggttttctagtaatctcaatcgtgcgcatcttgattatttctatgcccttctagctgctctcagtgcagtggagttatctgtcttctggttcttttccaaatcttatgtttacaagacaagaagcacatagaagaagctggaattctgtagtaaaaaaatgcatgcaagggatgtcctaatattaaacgagtttcctatattattagtgaattctaagacgagatgcaaaggatccaaattaccttgcaaactcaaatggaatcatatataaataattgattcattcgatctattttgtaatattgccgatgtaatttttttagctttgttaacttttgacaattttattctaacaataataattgctacagtattctcaatacttaggtaattattttttttaaaaaaaaaaaaaaa

SEQ ID NO: 203 - protein, 563 aa, Glycine max
MAIDDLCGDSEAETPLLSETLYGVVNFKGLPVLRSTSGGWKAAAFIITVEVAERFAYYGINSNLINYLTGPLGQSTVTAAENVNLWSGTASLLPLLGAFLADSFLGRYRTIVLASLIYVLGLSLLTFSTILPVTTSDGEVARPQLIFFFFSLYLVALAQGGHKPCVQAFGADQFDVNDPEECKARSSFFNWWYFAFSAGLFVTLFILNYVQDNVGWVLGFGIPCIAMLTALVIFLIGTWTYRFSIRREERGPFLRIGRVFIVAVNNWRITPSAVTSEEEACGTLPCHGSDQFSFLNKALIASNGSKEEGEVCSAAEVEEAKAVLRLVPIWATCLIFAIVFAQSSTFFTKQGVTMDREILPGFYVPPASLQSIISLSIVLFIPIYDRIIVPVARAFTGKPSGITMLQRIGTGMLLSAISMVIAAFVEMKRLKVARDCGLIDMPNVTIPMSIWWLVPQYALFGIADVFAMVGLQEFFYDQVPQELRSVGLSLYLSIFGVGSFLSGFLISAIENVTGKDNRHSWFSSNLNRAHLDYFYALLAALSAVELSVFWFFSKSYVYKTRST

SEQ ID NO: 204 - DNA, 2086 bp, Triticum aestivum
  CDS (73)..(1908)
agcatctacctacctacgtgtgcgccagctgctagcttggtggttgcctagtgttcagcgagcaagagatcaatggacgcgcctcggcagcagcaggaggaggagcgcaaggccatgggcaaggagaagacgaaggcggtgaaggccgtctccgaggaggctgagtcgtcgtcctcggatgccggcgacgacggcgaggaggcggcgggcgccgtccacaaccaccgcggatggaaggccatgccgtacgtcataggtaacgagacgttcgagaagctcgggacgatcggcacgctgtcgaacatgttggtgtacctgacgacggtgtaccacatgccaagcgtcaacgccgccaccctcctcaacgtcttctccggcaccagcaacctcgccaccgtcttcggcgcctacgtcagcgacacctacctcggccgctacaccaccatcgcagccgccaccatgtcctccttcatcggcatgctcatcctcacgctcacggccgctatccacaccctccatcctccggcgtgcaacgcgtccaaggggcaacaatgtgagggtcccactggctcccagctagccgccatcctggtgtccttcttcttcctggtcgtcggtgctggaggcatccggccctgcaacctcgccttcggggccgaccagttcaacccacgcacagccgatggtcgccgcggcatcgccagcttcttcaactggtactacttcaccttcacagtcgccatgatgctctcggcaactgtcatcatctacctccagagcaacgttaattgggcgctagggctcgccgtgcccgccgcgctcatgggcctctcatgcgccgtcttcttcatgggcacacgcctttatgtccgtgtacgccccgagggcagccccttcacaagcttcgcccaagtcctcgtcgccgcagcccgcaagcgccatctccgtcgagctcgcggcgatgccgagctgttcgacccgccacaccagagtaagctcgtctccaagctggcatacaccgaccagttcgcgtgcctcgataaagcggccgtgcggacccccgacgacgcgttgtgcatcgacgggaagacaccggcagacccatggcggttgtgcacggtgcagcaggtggaggaggtcaagtgcctagcgcgcatcattccggtgtggtcgtcggggatcgtctacttcatcgtgctcacccagctgggcacctacgtcgtgctccaggctgcgcagatggaccgccgaatcagcaactccagcagcttccagatcccgcaaggctccttcgtcgtcttccagatgctcgcccttacgacgtggatccctgtctacgaccggttcgtggtgccgacgctccgccgcttcacgaagcgcgagggcggcatcaccctgctccagcggatcggtgtcgggttggcgttgtccgtggcgacgatggtggtgtcggcggccgtggagcagcgacgacgaaggatcggctcgtcgatgtcatgcttctggctggtgccgcagcagctgttggcgggcttgtcagaggcgttcggcgccatcgggcagattgaattctactaccggcagttcccggagaacatgcggagcgtggcgggggcgctctacttcctggggttcgccatggcgagctacgcaagcgggctgatggtgatggtggtgcaccgggcgacgcgcgggcgggacggtcagcctgactggctggcgcaggacctggacgagggtagggtggacctattctacctggtcaccgccgccatcgccgccgtgaacctcgtctactttgtgatctgcgcacggtggtacaggttcaagaagtccgacgatgccggcgccggagatgtggagctcgacgacgacagcccgaagaaggctggcgctggtttagcttagttattattattattctttccttttggggcttcatatactccgatgcatgcatagaatggtagagtctaatggatatatgtgcatatatagctcatcgatcgatcccggggaatctatgtaatagggatttggaatcgatcaaaacagaacaggggagattgaagaaaaaaaaaaaaaa

SEQ ID NO: 205 - protein, 611 aa, Triticum aestivum
MDAPRQQQEEERKAMGKEKTKAVKAVSEEAESSSSDAGDDGEEAAGAVHNHRGWKAMPYVIGNETFEKLGTIGTLSNMLVYLTTVYHMPSVNAATLLNVFSGTSNLATVFGAYVSDTYLGRYTTIAAATMSSFIGMLILTLTAAIHTLHPPACNASKGQQCEGPTGSQLAAILVSFFFLVVGAGGIRPCNLAFGADQFNPRTADGRRGIASFFNWYYFTFTVAMMLSATVIIYLQSNVNWALGLAVPAALMGLSCAVFFMGTRLYVRVRPEGSPFTSFAQVLVAAARKRHLRRARGDAELFDPPHQSKLVSKLAYTDQFACLDKAAVRTPDDALCIDGKTPADPWRLCTVQQVEEVKCLARIIPVWSSGIVYFIVLTQLGTYVVLQAAQMDRRISNSSSFQIPQGSFVVFQMLALTTWIPVYDRFVVPTLRRFTKREGGITLLQRIGVGLALSVATMVVSAAVEQRRRRIGSSMSCFWLVPQQLLAGLSEAFGAIGQIEFYYRQFPENMRSVAGALYFLGFAMASYASGLMVMVVHRATRGRDGQPDWLAQDLDEGRVDLFYLVTAAIAAVNLVYFVICARWYRFKKSDDAGAGDVELDDDSPKKAGAGLA

SEQ ID NO: 206 - DNA, 1940 bp, Hordeum vulgare
  CDS (47)..(1747)
gctccggccagcctccgccggcacccacgggcagcagcggcgcgccatggacgctgaggccggagaggcgcccctcctctcccaccagcgcaactccaaccaggtttcctcgtcaaattacaactgcaaacccttcaactggaaagctcctgctattatcttggcatttgagttcttggagagcattgcatacgctggtattgccctcaacttggtagtatatcttgggaaggtccttcatggaaccactgcttcaaatgctgcgaatgttgatacatggaacggcaccacgttcctcatgcccgtccttggagcatttcttgctgatacatactgggggaagtacaagaccgtggctatctccgtaatattttatcttacagggttgctcatcattactgcttcggcgatcattccatctttacaacccgccccgtgtgaaggaaattcatgccctcctgccacagggtttcagtattttgtcttgtttgcttcactataccttgtctcgattgggaccggaggggttaaatcagctttgctcccccttggggctgatcagtatgatgattcaaaccttgaacagagtaaaaagaagcaagccttctttagctggttcttcattgccattaaccttggcgtcttcatctcagggaccgttgttgtatggatacagcaaaatgttgcttggtctcttggattcggcatctcatcagtatgcattattattgccacagttgccttcttggcaggaacaccaatctacagggttcaacttcctaccggaagcccactgaaaagtcttatagcagtgtttgtcgcgtcatttaaaaagagaaaagtggaggttcctgctgatagctcaatattgtttgatgggaatgatgctgatttaaccaatgaagcaccaaacaaattggcacatactgaaggattcaggtgcttagataaggctgctgtggtgttaggtgaccaagagataaaggagagcctttccgggcgtccatggatgctatgcactgtaactcaggtggaggaagtgaagatccttgtccggatgcttccaatatggttcaccagcgtgttctatgcagcatcgatgtgccaaacagccaccactttcatccaacaggggaacaaaatgaacacaaagatcggatccttctctgtccctcctgcttccatgaactcggcctcggtggtcttcatgatgatcttcgtcgtgatccaggacagcattgtgatcccaatagccaggcgatacacgggaaacgtcgctgggctcacgcagctgcagcggatgggcgtcggccggttcctagcggtcccggcgctggccgcggcggcactggttgagatgtggaggctgcgcagcgtcggggccggccacaacctgagcatagcgtggcagctcccccagttcatgctcatcgcctgctctgacgtgttctgcggcatagcccagctcgagttcttctactcggaagcccccatgtcgatgcggagcctatgctcggcattctcgttcctggcgatgtcgcttggttactacctgaactccatgatcatctcggccatcgctgctctgtcaaagagcggcggcgggaagggctggcttcccgccgacttgaacgacgggcatcttgactactacttctggctgtgggctgtgatcggcgcggtgaacttcgttgtgtacacggccttcgcgaagaattatacagtgaagaaagtcgagctccggtgaacacggtttgctgttggtcacaagcgtacagttcttatcctctttgttgtgtatgtactatctacaatacagctttggtgtaattaaatatcgctcaaattcctgtagttgtgtccatttgaataaaatgttcctttgaaacacaaatgaagcaaagctatagctctgtttgcagctgcaaaaaaaaaaaaaa

SEQ ID NO: 207 - protein, 566 aa, Hordeum vulgare
MDAEAGEAPLLSHQRNSNQVSSSNYNCKPFNWKAPAIILAFEFLESIAYAGIALNLVVYLGKVLHGTTASNAANVDTWNGTTFLMPVLGAFLADTYWGKYKTVAISVIFYLTGLLIITASAIIPSLQPAPCEGNSCPPATGFQYFVLFASLYLVSIGTGGVKSALLPLGADQYDDSNLEQSKKKQAFFSWFFIAINLGVFISGTVVVWIQQNVAWSLGFGISSVCIIIATVAFLAGTPIYRVQLPTGSPLKSLIAVFVASFKKRKVEVPADSSILFDGNDADLTNEAPNKLAHTEGFRCLDKAAVVLGDQEIKESLSGRPWMLCTVTQVEEVKILVRMLPIWFTSVFYAASMCQTATTFIQQGNKMNTKIGSFSVPPASMNSASVVFMMIFVVIQDSIVIPIARRYTGNVAGLTQLQRMGVGRFLAVPALAAAALVEMWRLRSVGAGHNLSIAWQLPQFMLIACSDVFCGIAQLEFFYSEAPMSMRSLCSAFSFLAMSLGYYLNSMIISAIAALSKSGGGKGWLPADLNDGHLDYYFWLWAVIGAVNFVVYTAFAKNYTVKKVELR

SEQ ID NO: 208 - DNA, 1837 bp, glycine max
  CDS (1)..(1764)
atgaaaaaaaaaaatatagagaccaaaattataaaaaaaaccaaaagtgatgaagagaaatgggtccatgatgcatctgtggattacaagggaagaatccctctccgtgcttccacgggtgtatggaaagcttcgctttttgtccttgcaattgaatttagtgaaaggatatgccactttgggatagccactaatcttatcatgtacctgactaaagtaatgcatgaagatctcaaaacagcgaccaagaatgtaaactactgggtaggagcaacaactttgatgcctctaattggaggatttgttgctgatgcctacactggtcgatttcgtatggtcctcttttcttccctcttatacctcaagggattaagcctcttgaccatgtctcaattcattccaagtctaaaaccatgcaacaatgagatatgccattggccaaggaaggttcatgaagtggttttattccttgccctttactgtgtcgccttgggaactggaggattcaaaccgtgcttacaaagctttggagcagatcaatttgatgatgaccaccttgaagaaaggaagaagaagatgtcattcttcaactggtggaattttacactttgcacggcaatgctgcttggggcaacagtgattgtttatgttcaagactttgtcagctggggagtatcttatctcatcctcagcatgttcatggctctcactatcattgctttctatgaggggaagcgtttttacaggtacaggagcacagaaggtaaccctttcatgctaattctacaagtactaattgcagcaataaggaaaagcaacttgtcctgtccttcaaatcccgattcattgtatgaattcccaaagtcagagaagtcacaaggaaggcttctaagccatacttgcaggctcaggtttcttgacaaggctgcaatagttgaagggaagtatactgagcatagagaccagaatccatggagattagcaacagtgacaagagtggaggagacaaagcttattctgaatgttattcccatatggctaacttcattaataattggtatatgtatagcgcaaggctcgacactctttgtcaatcaagcagcttctatgaacttaaagataatcaacagcttcaaaatcccaccagcttccatgacatctgtttcagctattagcccaataatagctatcccaatatatgataagattatagttccaattatgaggaaagtcaaaggtaacgaaaggggcatcagcgtcctttggagggttggcattggcttagcattcttagtcatagccatggtggttgctgccttagtagaaacaaagagattaagaatggttgaacatgatgaaacaatgagtgtgttgtggttgataccccaatacttgatccttggaattggagcagattcattgtctctaattggtttgcaagagtatttctatgacgaagttcctgactcaatgagaagcataggaatggccttgtatcttagtgtacttggagtaggatttttcttaagtagctttttaatcatcattgtggaacatgtcacggggaaaactggcaaaagttggattggaaaggacataaattcaagccgtttggataagttttattggatgctagctgtcataaatgcttttgttctgtgtgtctttctcttggtgtccaaaaggtacacctataagactgtacagagaagagctatggaaactgattcttgtaagagtgatggggttgagatggtggcttgatgagagcttctcagctgtacctctcactgctatattttcagctgaatcaaatgtttaatgtattgtttccata

SEQ ID NO: 209 - protein, 587 aa, glycine max
MKKKNIETKIIKKTKSDEEKWVHDASVDYKGRIPLRASTGVWKASLFVLAIEFSERICHFGIATNLIMYLTKVMHEDLKTATKNVNYWVGATTLMPLIGGFVADAYTGRFRMVLFSSLLYLKGLSLLTMSQFIPSLKPCNNEICHWPRKVHEVVLFLALYCVALGTGGFKPCLQSFGADQFDDDHLEERKKKMSFFNWWNFTLCTAMLLGATVIVYVQDFVSWGVSYLILSMFMALTIIAFYEGKRFYRYRSTEGNPFMLILQVLIAAIRKSNLSCPSNPDSLYEFPKSEKSQGRLLSHTCRLRFLDKAAIVEGKYTEHRDQNPWRLATVTRVEETKLILNVIPIWLTSLIIGICIAQGSTLFVNQAASMNLKIINSFKIPPASMTSVSAISPIIAIPIYDKIIVPIMRKVKGNERGISVLWRVGIGLAFLVIAMVVAALVETKRLRMVEHDETMSVLWLIPQYLILGIGADSLSLIGLQEYFYDEVPDSMRSIGMALYLSVLGVGFFLSSFLIIIVEHVTGKTGKSWIGKDINSSRLDKFYWMLAVINAFVLCVFLLVSKRYTYKTVQRRAMETDSCKSDGVEMVA

SEQ ID NO: 210 - DNA, 1988 bp, glycine max
  CDS (112)..(1899)
  misc_feature (1970)..(1970): n is a, g, c or t
  misc_feature (1971)..(1971): n is a, g, c or t
  misc_feature (1972)..(1972): n is a, g, c or t
  misc_feature (1973)..(1973): n is a, g, c or t
  misc_feature (1978)..(1978): n is a, g, c or t
  misc_feature (1979)..(1979): n is a, g, c or t
  misc_feature (1980)..(1980): n is a, g, c or t
  misc_feature (1982)..(1982): n is a, g, c or t
  misc_feature (1983)..(1983): n is a, g, c or t
  misc_feature (1984)..(1984): n is a, g, c or t
  misc_feature (1985)..(1985): n is a, g, c or t
  misc_feature (1986)..(1986): n is a, g, c or t
  misc_feature (1987)..(1987): n is a, g, c or t
  misc_feature (1988)..(1988): n is a, g, c or t
atttacattttaaatgttactaacgaggccacactaacaatggatttcatccacccatttcatttgtctatgtgacacaccatcagaaggttacaccttcaatttgtaaacatgaagcaggaaatggagaagagaaagcgtggaaaaagtgaagaaaaaggagaagagaaatgggtgcatgatgcatctgtggattataagggcagagttcctctccgtgcttccacaggtgtatggaaagcgtcgctttttgtccttgcaattgaatttagtgaaaggatatgccactttgggatagccactaatcttatcatgtacctgactaaagtaatgcatgaagatctcaaaacagcgaccaagaatgtaaactactgggtaggagcaacaactttgatgcctctaattggaggatttgttgctgatgcctacactggtcgatttcgtatggtcctcttttcttccctcttatacctcaagggattaagcctcttgaccatgtctcaattcattccaagtctaaaaccatgcaacaatgagatatgccattggccaaggaaggttcatgaagtggttttattccttgccctttactgtgtcgccttgggaactggaggattcaaaccgtgcttacaaagctttggagcagatcaatttgatgatgaccaccttgaagaaaggaagaagaagatgtcattcttcaactggtggaattttacactttgcacggcaatgctgcttggggcaacagtgattgtttatgttcaagactttgtcagctggggagtatcttatctcatcctcagcatgttcatggctctcactatcattgctttctatgaggggaagcgtttttacaggtacaggagcacagaaggtaaccctttcatgctaattctacaagtactaattgcagcaataaggaaaagcaacttgtcctgtccttcaaatcccgattcattgtatgaattcccaaagtcagagaagtcacaaggaaggcttctaagccatacttgcaggctcaggtttcttgacaaggctgcaatagttgaagggaagtatactgagcatagagaccagaatccatggagattagcaacagtgacaagagtggaggagacaaagcttattctgaatgttattcccatatggctaacttcattaataattggtatatgtatagcgcaaggctcgacactctttgtcaatcaagcagcttctatgaacttaaagataatcaacagcttcaaaatcccaccagcttccatgacatctgtttcagctattagcccaataatagctatcccaatatatgataagattatagttccaattatgaggaaagtcaaaggtaacgaaaggggcatcagcgtcctttggagggttggcattggcttagcattcttagtcatagccatggtggttgctgccttagtagaaacaaagagattaagaatggttgaacatgatgaagtgataacagtaggggggactaggcatgagacaatgagtgtgttgtggttgataccccaatacttgatccttggaattggagcagattcattgtctctaattggtttgcaagagtatttctatgaccaagttcctgactcagtgagaagcttaggagtgggtttgtatcttagtgtggttggagtaggattcttcttaagcagttttctgatcatcactgtggatcatgtcacggggaagaatggaaaaagttggattgcgaaggatataaattcaagtcgtctagataaattttattggatgttggctgtcataaatgctttcaatttgtgtttctttctattcttggcaaaggggtacacttataaaaccgtgcaaaggaaaactagggaaatttgtagtgatggggtggagacaatggaatcatgagagcttctcagctgtacctctcactgctatattttcagctgaatcaaatgtttaatgtattgtttcccttnnnnaaaannnannnnnnn

SEQ ID NO: 211 - protein, 595 aa, glycine max
MKQEMEKRKRGKSEEKGEEKWVHDASVDYKGRVPLRASTGVWKASLFVLAIEFSERICHFGIATNLIMYLTKVMHEDLKTATKNVNYWVGATTLMPLIGGFVADAYTGRFRMVLFSSLLYLKGLSLLTMSQFIPSLKPCNNEICHWPRKVHEVVLFLALYCVALGTGGFKPCLQSFGADQFDDDHLEERKKKMSFFNWWNFTLCTAMLLGATVIVYVQDFVSWGVSYLILSMFMALTIIAFYEGKRFYRYRSTEGNPFMLILQVLIAAIRKSNLSCPSNPDSLYEFPKSEKSQGRLLSHTCRLRFLDKAAIVEGKYTEHRDQNPWRLATVTRVEETKLILNVIPIWLTSLIIGICIAQGSTLFVNQAASMNLKIINSFKIPPASMTSVSAISPIIAIPIYDKIIVPIMRKVKGNERGISVLWRVGIGLAFLVIAMVVAALVETKRLRMVEHDEVITVGGTRHETMSVLWLIPQYLILGIGADSLSLIGLQEYFYDQVPDSVRSLGVGLYLSVVGVGFFLSSFLIITVDHVTGKNGKSWIAKDINSSRLDKFYWMLAVINAFNLCFFLFLAKGYTYKTVQRKTREICSDGVETMES

SEQ ID NO: 212 - DNA, 2691 bp, glycine max
  CDS (142)..(1860)
ggctcgagctcgagccgctcgagccgagtcgggtcgaggcttgcttgagttgccaactttaagtttgtcaatttccgtgctgcttggttggttgcaattgcaagtgaacaattggctagtgtgtactagttttgaatcacaatggcagaggatgatggttacacgaaagatggaacagtcgattactgtggaaatccagctaataaaaaggaaactggaacctggaaagcctgcccctatatcttaggaaacgaatgttgtgagagattggcttattatgggatgagcacaaacctggtgctttatttcaagaaccggctaaatcagcatagtgctactgcttccaagaatgtctctaattggagtggaacttgctatatcacaccattgattggggcatatttggctgattcctaccttggaagatattggacaattgctgttttttcaataatttatgctattggaatgacactcttgacattgtctgcatcagttcctggcataaaaccaacatgtcatggacatggagatgaaaattgtcgtgctactactctagagagtgcagtgtgcttcctagctctttaccttattgctcttggcaccggtggcattaagccttgtgtctcatcctatggagcagatcagtttgatgacactgactcggctgagaaggaacgcaagagttctttcttcaattggttctatttttcaatcaacattggcgctcttattgcatcttctctattggtttggatacaagataatgtgggttggggatggggctttggtattcctgctgtagccatggcaattgctgtggtgagtttcttttcaggcactaggttgtataggaatcagaagcctggaggcagtgccatcactagaatctgtcaggtggtaatggcatccataagaaaatacaatgttgaagtacctgctgacgagtcacttttatatgagactgctgaaactgaatctgctataaaaggaagccgaaagcttgaccacacaaatgagctaagattttttgacaaagcagcagtgctagcacagtcagataaagtgaaggaatcaacaaacccttggagactttgcactgtaactcaagtggaagagctgaaatccattttaagaatactcttaaaatgggccactggcatcatattttccactgtctatggtcaaatgagcaccttatttgtgttgcaaggacaaaccatggacactcgtgttgccaactccgaatcggctcgagcaccagcttcactgtccatctttgacaccctcagtgtcatattttgggtcccagtgtatgacaggatcattgtgccaattgctacaaagttcactgggaacaaaaatggcctaactcagctccagagaatgggaattggcctcttcatatccatattttccatggtagctgcagcaatattggagctcatacggcttagaatggtgaggaggcacaactactatcaacttgaggagataccaatgacaatattttggcaggttcctcaatatttcatcataggctgtgcagaagtcttctatttcattggtcagttggagttcttctatgagcaagcccctgatgctatgcgaagcttttgttctgctctctcacttaccactgttgcgcttggacagtacttgagctctctgcttgtgacaattgtgacaaagatcagcactaggaatggaagtccagggtggatacctgataatctaaactttggtcacatagattatttcttctggctattggcattgctaagtgtagtgaacttgatagcattccttgtggtgtctatgttgtatacatataagagacctgtgggaactctgcgctgaaaagtgggttaagttgtacattggaagtagtttcattatacatcacattggaagtttccttcacttgtagtcttgtttttcacctacactgtaagctcttgtgtcaaatccttgaaaaaatgatgtaaaattgttattatcaccattgctattatgtgtctgatctttctcatcaacatgcaggaattaaagttaaccaatgatagctcagttctatccaagtttaaagacatcccatcttataaaagggttatgttattgaaggataaaatgggcgacgtaccaagacaaacagtggaagaaataaagaagcatgcggatgcagtgaatcttccaaaaacctcaattatcaaagtatctaattccatcttagtaggaatgacaaatgttgtcaaagagttgaaagatgcaaacctcacagtattcgtccataatctcaaaaacgaatacacaaccctggcattcgactattggtctgatcctaatgtcaagattgcaacttacgtccaaactgccaaggttgatggaatcgtgaccgattttctagccactgcaagtagattcatgaggagtcccatgatcctgcctggtgatctattaaacaccattcctactgaacttcagccaccagcacttcctcctcttaaggttgcaaaggttgttaacagaggcctttctatagtagctattttagtgtttgctatgctattcgctggtcattaattattaatgtgattaacccctagcacaatctagagatcgctaactttcctctaacatcgtgtcgtgttttaatttgtattatagaatgcacacattggttctcagaaa

SEQ ID NO: 213 - protein, 572 aa, glycine max
MAEDDGYTKDGTVDYCGNPANKKETGTWKACPYILGNECCERLAYYGMSTNLVLYFKNRLNQHSATASKNVSNWSGTCYITPLIGAYLADSYLGRYWTIAVFSIIYAIGMTLLTLSASVPGIKPTCHGHGDENCRATTLESAVCFLALYLIALGTGGIKPCVSSYGADQFDDTDSAEKERKSSFFNWFYFSINIGALIASSLLVWIQDNVGWGWGFGIPAVAMAIAVVSFFSGTRLYRNQKPGGSAITRICQVVMASIRKYNVEVPADESLLYETAETESAIKGSRKLDHTNELRFFDKAAVLAQSDKVKESTNPWRLCTVTQVEELKSILRILLKWATGIIFSTVYGQMSTLFVLQGQTMDTRVANSESARAPASLSIFDTLSVIFWVPVYDRIIVPIATKFTGNKNGLTQLQRMGIGLFISIFSMVAAAILELIRLRMVRRHNYYQLEEIPMTIFWQVPQYFIIGCAEVFYFIGQLEFFYEQAPDAMRSFCSALSLTTVALGQYLSSLLVTIVTKISTRNGSPGWIPDNLNFGHIDYFFWLLALLSVVNLIAFLVVSMLYTYKRPVGTLR

SEQ ID NO: 214 - DNA, 2437 bp, glycine max
  CDS (84)..(1841)
  misc_feature (2040)..(2040): n is a, g, c or t
  misc_feature (2041)..(2041): n is a, g, c or t
  misc_feature (2042)..(2042): n is a, g, c or t
  misc_feature (2043)..(2043): n is a, g, c or t
  misc_feature (2044)..(2044): n is a, g, c or t
  misc_feature (2045)..(2045): n is a, g, c or t
  misc_feature (2046)..(2046): n is a, g, c or t
  misc_feature (2047)..(2047): n is a, g, c or t
  misc_feature (2048)..(2048): n is a, g, c or t
  misc_feature (2049)..(2049): n is a, g, c or t
  misc_feature (2050)..(2050): n is a, g, c or t
  misc_feature (2051)..(2051): n is a, g, c or t
  misc_feature (2052)..(2052): n is a, g, c or t
  misc_feature (2053)..(2053): n is a, g, c or t
  misc_feature (2054)..(2054): n is a, g, c or t
  misc_feature (2055)..(2055): n is a, g, c or t
  misc_feature (2056)..(2056): n is a, g, c or t
  misc_feature (2057)..(2057): n is a, g, c or t
  misc_feature (2058)..(2058): n is a, g, c or t
  misc_feature (2059)..(2059): n is a, g, c or t
  misc_feature (2060)..(2060): n is a, g, c or t
  misc_feature (2061)..(2061): n is a, g, c or t
  misc_feature (2062)..(2062): n is a, g, c or t
  misc_feature (2063)..(2063): n is a, g, c or t
  misc_feature (2064)..(2064): n is a, g, c or t
  misc_feature (2065)..(2065): n is a, g, c or t
  misc_feature (2066)..(2066): n is a, g, c or t
  misc_feature (2067)..(2067): n is a, g, c or t
  misc_feature (2068)..(2068): n is a, g, c or t
  misc_feature (2069)..(2069): n is a, g, c or t
  misc_feature (2070)..(2070): n is a, g, c or t
  misc_feature (2071)..(2071): n is a, g, c or t
  misc_feature (2072)..(2072): n is a, g, c or t
  misc_feature (2073)..(2073): n is a, g, c or t
  misc_feature (2074)..(2074): n is a, g, c or t
  misc_feature (2075)..(2075): n is a, g, c or t
  misc_feature (2076)..(2076): n is a, g, c or t
  misc_feature (2077)..(2077): n is a, g, c or t
  misc_feature (2078)..(2078): n is a, g, c or t
  misc_feature (2079)..(2079): n is a, g, c or t
  misc_feature (2080)..(2080): n is a, g, c or t
  misc_feature (2081)..(2081): n is a, g, c or t
  misc_feature (2082)..(2082): n is a, g, c or t
  misc_feature (2083)..(2083): n is a, g, c or t
  misc_feature (2084)..(2084): n is a, g, c or t
  misc_feature (2085)..(2085): n is a, g, c or t
  misc_feature (2086)..(2086): n is a, g, c or t
  misc_feature (2087)..(2087): n is a, g, c or t
  misc_feature (2088)..(2088): n is a, g, c or t
  misc_feature (2089)..(2089): n is a, g, c or t
  misc_feature (2090)..(2090): n is a, g, c or t
  misc_feature (2091)..(2091): n is a, g, c or t
  misc_feature (2092)..(2092): n is a, g, c or t
  misc_feature (2093)..(2093): n is a, g, c or t
  misc_feature (2094)..(2094): n is a, g, c or t
  misc_feature (2095)..(2095): n is a, g, c or t
  misc_feature (2096)..(2096): n is a, g, c or t
  misc_feature (2097)..(2097): n is a, g, c or t
  misc_feature (2098)..(2098): n is a, g, c or t
  misc_feature (2099)..(2099): n is a, g, c or t
  misc_feature (2100)..(2100): n is a, g, c or t
  misc_feature (2101)..(2101): n is a, g, c or t
  misc_feature (2102)..(2102): n is a, g, c or t
  misc_feature (2103)..(2103): n is a, g, c or t
  misc_feature (2104)..(2104): n is a, g, c or t
  misc_feature (2105)..(2105): n is a, g, c or t
  misc_feature (2106)..(2106): n is a, g, c or t
  misc_feature (2107)..(2107): n is a, g, c or t
  misc_feature (2108)..(2108): n is a, g, c or t
  misc_feature (2109)..(2109): n is a, g, c or t
  misc_feature (2110)..(2110): n is a, g, c or t
  misc_feature (2111)..(2111): n is a, g, c or t
  misc_feature (2112)..(2112): n is a, g, c or t
  misc_feature (2113)..(2113): n is a, g, c or t
  misc_feature (2114)..(2114): n is a, g, c or t
  misc_feature (2115)..(2115): n is a, g, c or t
  misc_feature (2116)..(2116): n is a, g, c or t
  misc_feature (2117)..(2117): n is a, g, c or t
  misc_feature (2118)..(2118): n is a, g, c or t
  misc_feature (2119)..(2119): n is a, g, c or t
  misc_feature (2120)..(2120): n is a, g, c or t
  misc_feature (2121)..(2121): n is a, g, c or t
  misc_feature (2122)..(2122): n is a, g, c or t
  misc_feature (2123)..(2123): n is a, g, c or t
  misc_feature (2124)..(2124): n is a, g, c or t
  misc_feature (2125)..(2125): n is a, g, c or t
  misc_feature (2126)..(2126): n is a, g, c or t
  misc_feature (2127)..(2127): n is a, g, c or t
  misc_feature (2128)..(2128): n is a, g, c or t
  misc_feature (2129)..(2129): n is a, g, c or t
  misc_feature (2130)..(2130): n is a, g, c or t
  misc_feature (2131)..(2131): n is a, g, c or t
  misc_feature (2132)..(2132): n is a, g, c or t
  misc_feature (2133)..(2133): n is a, g, c or t
  misc_feature (2134)..(2134): n is a, g, c or t
  misc_feature (2135)..(2135): n is a, g, c or t
  misc_feature (2136)..(2136): n is a, g, c or t
  misc_feature (2137)..(2137): n is a, g, c or t
  misc_feature (2138)..(2138): n is a, g, c or t
  misc_feature (2139)..(2139): n is a, g, c or t
  misc_feature (2140)..(2140): n is a, g, c or t
  misc_feature (2141)..(2141): n is a, g, c or t
  misc_feature (2142)..(2142): n is a, g, c or t
  misc_feature (2143)..(2143): n is a, g, c or t
  misc_feature (2144)..(2144): n is a, g, c or t
  misc_feature (2145)..(2145): n is a, g, c or t
  misc_feature (2146)..(2146): n is a, g, c or t
  misc_feature (2147)..(2147): n is a, g, c or t
  misc_feature (2148)..(2148): n is a, g, c or t
  misc_feature (2149)..(2149): n is a, g, c or t
  misc_feature (2150)..(2150): n is a, g, c or t
  misc_feature (2151)..(2151): n is a, g, c or t
  misc_feature (2152)..(2152): n is a, g, c or t
  misc_feature (2153)..(2153): n is a, g, c or t
  misc_feature (2154)..(2154): n is a, g, c or t
  misc_feature (2155)..(2155): n is a, g, c or t
  misc_feature (2156)..(2156): n is a, g, c or t
  misc_feature (2157)..(2157): n is a, g, c or t
  misc_feature (2158)..(2158): n is a, g, c or t
  misc_feature (2159)..(2159): n is a, g, c or t
  misc_feature (2160)..(2160): n is a, g, c or t
  misc_feature (2161)..(2161): n is a, g, c or t
  misc_feature (2162)..(2162): n is a, g, c or t
  misc_feature (2163)..(2163): n is a, g, c or t
  misc_feature (2164)..(2164): n is a, g, c or t
  misc_feature (2165)..(2165): n is a, g, c or t
  misc_feature (2166)..(2166): n is a, g, c or t
  misc_feature (2167)..(2167): n is a, g, c or t
  misc_feature (2168)..(2168): n is a, g, c or t
  misc_feature (2169)..(2169): n is a, g, c or t
  misc_feature (2170)..(2170): n is a, g, c or t
  misc_feature (2171)..(2171): n is a, g, c or t
  misc_feature (2172)..(2172): n is a, g, c or t
  misc_feature (2173)..(2173): n is a, g, c or t
  misc_feature (2174)..(2174): n is a, g, c or t
  misc_feature (2175)..(2175): n is a, g, c or t
  misc_feature (2176)..(2176): n is a, g, c or t
  misc_feature (2177)..(2177): n is a, g, c or t
  misc_feature (2178)..(2178): n is a, g, c or t
  misc_feature (2179)..(2179): n is a, g, c or t
  misc_feature (2180)..(2180): n is a, g, c or t
  misc_feature (2181)..(2181): n is a, g, c or t
  misc_feature (2182)..(2182): n is a, g, c or t
  misc_feature (2183)..(2183): n is a, g, c or t
  misc_feature (2184)..(2184): n is a, g, c or t
  misc_feature (2185)..(2185): n is a, g, c or t
  misc_feature (2186)..(2186): n is a, g, c or t
  misc_feature (2187)..(2187): n is a, g, c or t
  misc_feature (2188)..(2188): n is a, g, c or t
  misc_feature (2189)..(2189): n is a, g, c or t
  misc_feature (2190)..(2190): n is a, g, c or t
  misc_feature (2191)..(2191): n is a, g, c or t
  misc_feature (2192)..(2192): n is a, g, c or t
  misc_feature (2193)..(2193): n is a, g, c or t
  misc_feature (2194)..(2194): n is a, g, c or t
  misc_feature (2195)..(2195): n is a, g, c or t
  misc_feature (2196)..(2196): n is a, g, c or t
  misc_feature (2197)..(2197): n is a, g, c or t
  misc_feature (2198)..(2198): n is a, g, c or t
  misc_feature (2199)..(2199): n is a, g, c or t
  misc_feature (2200)..(2200): n is a, g, c or t
  misc_feature (2201)..(2201): n is a, g, c or t
  misc_feature (2202)..(2202): n is a, g, c or t
  misc_feature (2203)..(2203): n is a, g, c or t
  misc_feature (2204)..(2204): n is a, g, c or t
  misc_feature (2205)..(2205): n is a, g, c or t
  misc_feature (2206)..(2206): n is a, g, c or t
  misc_feature (2207)..(2207): n is a, g, c or t
  misc_feature (2208)..(2208): n is a, g, c or t
  misc_feature (2209)..(2209): n is a, g, c or t
  misc_feature (2210)..(2210): n is a, g, c or t
  misc_feature (2211)..(2211): n is a, g, c or t
  misc_feature (2212)..(2212): n is a, g, c or t
  misc_feature (2213)..(2213): n is a, g, c or t
  misc_feature (2214)..(2214): n is a, g, c or t
  misc_feature (2215)..(2215): n is a, g, c or t
  misc_feature (2216)..(2216): n is a, g, c or t
  misc_feature (2217)..(2217): n is a, g, c or t
  misc_feature (2218)..(2218): n is a, g, c or t
  misc_feature (2219)..(2219): n is a, g, c or t
  misc_feature (2220)..(2220): n is a, g, c or t
  misc_feature (2221)..(2221): n is a, g, c or t
  misc_feature (2222)..(2222): n is a, g, c or t
  misc_feature (2223)..(2223): n is a, g, c or t
  misc_feature (2224)..(2224): n is a, g, c or t
  misc_feature (2225)..(2225): n is a, g, c or t
  misc_feature (2226)..(2226): n is a, g, c or t
  misc_feature (2227)..(2227): n is a, g, c or t
  misc_feature (2228)..(2228): n is a, g, c or t
  misc_feature (2229)..(2229): n is a, g, c or t
  misc_feature (2230)..(2230): n is a, g, c or t
  misc_feature (2231)..(2231): n is a, g, c or t
  misc_feature (2232)..(2232): n is a, g, c or t
  misc_feature (2233)..(2233): n is a, g, c or t
  misc_feature (2234)..(2234): n is a, g, c or t
  misc_feature (2235)..(2235): n is a, g, c or t
  misc_feature (2236)..(2236): n is a, g, c or t
  misc_feature (2237)..(2237): n is a, g, c or t
  misc_feature (2238)..(2238): n is a, g, c or t
  misc_feature (2239)..(2239): n is a, g, c or t
  misc_feature (2240)..(2240): n is a, g, c or t
  misc_feature (2241)..(2241): n is a, g, c or t
  misc_feature (2242)..(2242): n is a, g, c or t
  misc_feature (2243)..(2243): n is a, g, c or t
  misc_feature (2244)..(2244): n is a, g, c or t
  misc_feature (2245)..(2245): n is a, g, c or t
  misc_feature (2246)..(2246): n is a, g, c or t
  misc_feature (2247)..(2247): n is a, g, c or t
  misc_feature (2248)..(2248): n is a, g, c or t
  misc_feature (2249)..(2249): n is a, g, c or t
  misc_feature (2250)..(2250): n is a, g, c or t
  misc_feature (2251)..(2251): n is a, g, c or t
  misc_feature (2252)..(2252): n is a, g, c or t
  misc_feature (2253)..(2253): n is a, g, c or t
  misc_feature (2254)..(2254): n is a, g, c or t
  misc_feature (2255)..(2255): n is a, g, c or t
  misc_feature (2256)..(2256): n is a, g, c or t
  misc_feature (2257)..(2257): n is a, g, c or t
  misc_feature (2258)..(2258): n is a, g, c or t
  misc_feature (2259)..(2259): n is a, g, c or t
  misc_feature (2260)..(2260): n is a, g, c or t
  misc_feature (2261)..(2261): n is a, g, c or t
  misc_feature (2262)..(2262): n is a, g, c or t
  misc_feature (2263)..(2263): n is a, g, c or t
  misc_feature (2264)..(2264): n is a, g, c or t
  misc_feature (2265)..(2265): n is a, g, c or t
  misc_feature (2266)..(2266): n is a, g, c or t
  misc_feature (2267)..(2267): n is a, g, c or t
  misc_feature (2268)..(2268): n is a, g, c or t
  misc_feature (2269)..(2269): n is a, g, c or t
  misc_feature (2270)..(2270): n is a, g, c or t
  misc_feature (2271)..(2271): n is a, g, c or t
  misc_feature (2272)..(2272): n is a, g, c or t
  misc_feature (2273)..(2273): n is a, g, c or t
  misc_feature (2274)..(2274): n is a, g, c or t
  misc_feature (2275)..(2275): n is a, g, c or t
  misc_feature (2276)..(2276): n is a, g, c or t
  misc_feature (2277)..(2277): n is a, g, c or t
  misc_feature (2278)..(2278): n is a, g, c or t
  misc_feature (2279)..(2279): n is a, g, c or t
  misc_feature (2280)..(2280): n is a, g, c or t
  misc_feature (2281)..(2281): n is a, g, c or t
  misc_feature (2282)..(2282): n is a, g, c or t
  misc_feature (2283)..(2283): n is a, g, c or t
  misc_feature (2284)..(2284): n is a, g, c or t
  misc_feature (2285)..(2285): n is a, g, c or t
  misc_feature (2286)..(2286): n is a, g, c or t
  misc_feature (2287)..(2287): n is a, g, c or t
  misc_feature (2288)..(2288): n is a, g, c or t
  misc_feature (2289)..(2289): n is a, g, c or t
  misc_feature (2290)..(2290): n is a, g, c or t
  misc_feature (2291)..(2291): n is a, g, c or t
  misc_feature (2292)..(2292): n is a, g, c or t
  misc_feature (2293)..(2293): n is a, g, c or t
  misc_feature (2294)..(2294): n is a, g, c or t
  misc_feature (2295)..(2295): n is a, g, c or t
  misc_feature (2296)..(2296): n is a, g, c or t
  misc_feature (2297)..(2297): n is a, g, c or t
  misc_feature (2298)..(2298): n is a, g, c or t
  misc_feature (2299)..(2299): n is a, g, c or t
  misc_feature (2300)..(2300): n is a, g, c or t
  misc_feature (2301)..(2301): n is a, g, c or t
  misc_feature (2302)..(2302): n is a, g, c or t
  misc_feature (2303)..(2303): n is a, g, c or t
  misc_feature (2304)..(2304): n is a, g, c or t
  misc_feature (2305)..(2305): n is a, g, c or t
  misc_feature (2306)..(2306): n is a, g, c or t
  misc_feature (2307)..(2307): n is a, g, c or t
  misc_feature (2308)..(2308): n is a, g, c or t
  misc_feature (2309)..(2309): n is a, g, c or t
  misc_feature (2310)..(2310): n is a, g, c or t
  misc_feature (2311)..(2311): n is a, g, c or t
  misc_feature (2312)..(2312): n is a, g, c or t
  misc_feature (2313)..(2313): n is a, g, c or t
  misc_feature (2314)..(2314): n is a, g, c or t
  misc_feature (2315)..(2315): n is a, g, c or t
  misc_feature (2316)..(2316): n is a, g, c or t
  misc_feature (2317)..(2317): n is a, g, c or t
  misc_feature (2318)..(2318): n is a, g, c or t
  misc_feature (2319)..(2319): n is a, g, c or t
  misc_feature (2320)..(2320): n is a, g, c or t
  misc_feature (2321)..(2321): n is a, g, c or t
  misc_feature (2322)..(2322): n is a, g, c or t
  misc_feature (2323)..(2323): n is a, g, c or t
  misc_feature (2324)..(2324): n is a, g, c or t
  misc_feature (2325)..(2325): n is a, g, c or t
  misc_feature (2326)..(2326): n is a, g, c or t
  misc_feature (2327)..(2327): n is a, g, c or t
  misc_feature (2328)..(2328): n is a, g, c or t
  misc_feature (2329)..(2329): n is a, g, c or t
  misc_feature (2330)..(2330): n is a, g, c or t
  misc_feature (2331)..(2331): n is a, g, c or t
  misc_feature (2332)..(2332): n is a, g, c or t
  misc_feature (2333)..(2333): n is a, g, c or t
  misc_feature (2334)..(2334): n is a, g, c or t
  misc_feature (2335)..(2335): n is a, g, c or t
  misc_feature (2336)..(2336): n is a, g, c or t
  misc_feature (2337)..(2337): n is a, g, c or t
  misc_feature (2338)..(2338): n is a, g, c or t
  misc_feature (2339)..(2339): n is a, g, c or t
  misc_feature (2340)..(2340): n is a, g, c or t
  misc_feature (2341)..(2341): n is a, g, c or t
  misc_feature (2342)..(2342): n is a, g, c or t
  misc_feature (2343)..(2343): n is a, g, c or t
  misc_feature (2344)..(2344): n is a, g, c or t
  misc_feature (2345)..(2345): n is a, g, c or t
  misc_feature (2346)..(2346): n is a, g, c or t
  misc_feature (2347)..(2347): n is a, g, c or t
  misc_feature (2348)..(2348): n is a, g, c or t
  misc_feature (2349)..(2349): n is a, g, c or t
  misc_feature (2350)..(2350): n is a, g, c or t
  misc_feature (2351)..(2351): n is a, g, c or t
  misc_feature (2352)..(2352): n is a, g, c or t
  misc_feature (2353)..(2353): n is a, g, c or t
  misc_feature (2354)..(2354): n is a, g, c or t
  misc_feature (2355)..(2355): n is a, g, c or t
  misc_feature (2356)..(2356): n is a, g, c or t
  misc_feature (2357)..(2357): n is a, g, c or t
  misc_feature (2358)..(2358): n is a, g, c or t
  misc_feature (2359)..(2359): n is a, g, c or t
  misc_feature (2360)..(2360): n is a, g, c or t
  misc_feature (2361)..(2361): n is a, g, c or t
  misc_feature (2362)..(2362): n is a, g, c or t
  misc_feature (2363)..(2363): n is a, g, c or t
  misc_feature (2364)..(2364): n is a, g, c or t
  misc_feature (2365)..(2365): n is a, g, c or t
  misc_feature (2366)..(2366): n is a, g, c or t
  misc_feature (2367)..(2367): n is a, g, c or t
  misc_feature (2368)..(2368): n is a, g, c or t
  misc_feature (2369)..(2369): n is a, g, c or t
  misc_feature (2370)..(2370): n is a, g, c or t
  misc_feature (2371)..(2371): n is a, g, c or t
  misc_feature (2372)..(2372): n is a, g, c or t
  misc_feature (2373)..(2373): n is a, g, c or t
  misc_feature (2374)..(2374): n is a, g, c or t
  misc_feature (2375)..(2375): n is a, g, c or t
  misc_feature (2376)..(2376): n is a, g, c or t
  misc_feature (2377)..(2377): n is a, g, c or t
  misc_feature (2378)..(2378): n is a, g, c or t
  misc_feature (2379)..(2379): n is a, g, c or t
  misc_feature (2380)..(2380): n is a, g, c or t
  misc_feature (2381)..(2381): n is a, g, c or t
  misc_feature (2382)..(2382): n is a, g, c or t
  misc_feature (2383)..(2383): n is a, g, c or t
  misc_feature (2384)..(2384): n is a, g, c or t
  misc_feature (2385)..(2385): n is a, g, c or t
  misc_feature (2386)..(2386): n is a, g, c or t
  misc_feature (2387)..(2387): n is a, g, c or t
  misc_feature (2388)..(2388): n is a, g, c or t
  misc_feature (2389)..(2389): n is a, g, c or t
  misc_feature (2390)..(2390): n is a, g, c or t
  misc_feature (2391)..(2391): n is a, g, c or t
  misc_feature (2392)..(2392): n is a, g, c or t
  misc_feature (2393)..(2393): n is a, g, c or t
  misc_feature (2394)..(2394): n is a, g, c or t
  misc_feature (2395)..(2395): n is a, g, c or t
  misc_feature (2396)..(2396): n is a, g, c or t
  misc_feature (2397)..(2397): n is a, g, c or t
  misc_feature (2398)..(2398): n is a, g, c or t
  misc_feature (2399)..(2399): n is a, g, c or t
  misc_feature (2400)..(2400): n is a, g, c or t
  misc_feature (2401)..(2401): n is a, g, c or t
  misc_feature (2402)..(2402): n is a, g, c or t
  misc_feature (2403)..(2403): n is a, g, c or t
  misc_feature (2404)..(2404): n is a, g, c or t
  misc_feature (2405)..(2405): n is a, g, c or t
  misc_feature (2406)..(2406): n is a, g, c or t
  misc_feature (2407)..(2407): n is a, g, c or t
  misc_feature (2408)..(2408): n is a, g, c or t
  misc_feature (2409)..(2409): n is a, g, c or t
  misc_feature (2410)..(2410): n is a, g, c or t
  misc_feature (2411)..(2411): n is a, g, c or t
  misc_feature (2412)..(2412): n is a, g, c or t
  misc_feature (2413)..(2413): n is a, g, c or t
  misc_feature (2414)..(2414): n is a, g, c or t
  misc_feature (2415)..(2415): n is a, g, c or t
  misc_feature (2416)..(2416): n is a, g, c or t
  misc_feature (2417)..(2417): n is a, g, c or t
  misc_feature (2418)..(2418): n is a, g, c or t
  misc_feature (2419)..(2419): n is a, g, c or t
  misc_feature (2420)..(2420): n is a, g, c or t
  misc_feature (2421)..(2421): n is a, g, c or t
  misc_feature (2422)..(2422): n is a, g, c or t
  misc_feature (2423)..(2423): n is a, g, c or t
  misc_feature (2424)..(2424): n is a, g, c or t
  misc_feature (2425)..(2425): n is a, g, c or t
  misc_feature (2426)..(2426): n is a, g, c or t
  misc_feature (2427)..(2427): n is a, g, c or t
  misc_feature (2428)..(2428): n is a, g, c or t
  misc_feature (2429)..(2429): n is a, g, c or t
  misc_feature (2430)..(2430): n is a, g, c or t
  misc_feature (2431)..(2431): n is a, g, c or t
  misc_feature (2432)..(2432): n is a, g, c or t
  misc_feature (2433)..(2433): n is a, g, c or t
  misc_feature (2434)..(2434): n is a, g, c or t
  misc_feature (2435)..(2435): n is a, g, c or t
  misc_feature (2436)..(2436): n is a, g, c or t
  misc_feature (2437)..(2437): n is a, g, c or t
aaaatgatatatacttgagataataaattaacccaaaaaattctcagtgagaaattagaaggttacaccttcaatttgtaaacatgaagcaggaaatggagaagagaaagggaggtagaattgaagaaagtgatgaagagaaatgggtccatgatgcatctgtggattacaagggaagaatccctctccgtgcttccacgggtgtatggaaagcttcgctttttgtccttgcaattgaatttagtgaaaggatagcccactttgggatatccagtaatcttatcatgtatctgactgaagtgatgcatgaagacctaaagacagcaaccaataatgcaaacttgtggaaaggagcaacaaccttgttgcctatgattgggggatttcttggtgatgcctacaccggtcgatttcgtatggtagtcttttcttccctcgtatacttcaagggattaagcctcttgaccatgtctcaattcattccaaatctaaaaccatgcaacaatgatatatgtcatcagccaagaaaggttcatgaagtggttttcttccttgctctttactgtatcgccttgggaactggaggattcaaaccatgcttagaaagttttggaggtgatcaatttgatggtgacaaccttgaagaacgaaagaagaagatgtctttcttcaactggtggacctttacattcagcattgctttgttgctagcgacaacggtggttgtttatgttcaggacttcgttagctggggagttgcttatctcatcctcgctatgttcatggctctcactatcattgctttctatgtggggatacctttttacaggtacagaatgaggccaaacgcaaatcctttcataccaattctacaagtcctaattgcatccataaggaaaaggaatttgtcttgtccttcaaatcctgctttattatgtgaagtcccaatgtcagagaattcccaaggaaggcttctaaaccatactagcaggctcaggtttcttgacaaggctgcaatagttgaagaaaagtatattgagaagaaagctggcccatggagattagcaacagtgacaagagtggaggagacaaagcttattctaaatgttgttccgatatggctaacttcattaatgattggtgtatgcatagcacaaggttcgacactctttgtcaaacaagcagctgctatgaacttaaagataagcgacaacttcaaaattccaccagcttccatggcgtccctttcagcctttagcaccataatatctgtcccaatatatgatagaattattgttccaattctaaggaaagtcagaggtaacgaaagaggcatcagcatccttgggaggattggcattggcttaatattcttagtcatactcatggttgttgctgccttagtagaaaatatgagattaagaatgcctggtcatgagacaatgagtgtgatgtggttgataccccaatacttgatccttggcattggaaattcattttatctaattgctttgcaagagtatttctatgatgaagttcctgactcaatgagaagcgtaggaatggctttgtatcttagtgtgattggaataggattcttcttaagcagctttctaataataattgtggaccatgtcacagggaagaatggcaaaggttggattgccaaggatgtaaactcaagtcgtctagataagttttattggatgttggctgtcataagtgctttaaatttgtgtctcttcctattcttggcaaagaggtttacttataagaccgcacggaggaaagctacggaaattgattgttctaactgtgatggggtggatacagtggcatgagagccgggccccccccctccccgcccccccccccccccccccctcctccccccccccccgcggacaacagagatcccagggcccgcagccccccgcctcttttttttttttctccccccccccccccccaacccccgccactacgcggccccgcccccccgcccccgcccagcaccaataaaaacaccaccatcaacgnnnnnnnnnnnnnnnnnnnnnnnnnnnnnnnnnnnnnnnnnnnnnnnnnnnnnnnnnnnnnnnnnnnnnnnnnnnnnnnnnnnnnnnnnnnnnnnnnnnnnnnnnnnnnnnnnnnnnnnnnnnnnnnnnnnnnnnnnnnnnnnnnnnnnnnnnnnnnnnnnnnnnnnnnnnnnnnnnnnnnnnnnnnnnnnnnnnnnnnnnnnnnnnnnnnnnnnnnnnnnnnnnnnnnnnnnnnnnnnnnnnnnnnnnnnnnnnnnnnnnnnnnnnnnnnnnnnnnnnnnnnnnnnnnnnnnnnnnnnnnnnnnnnnnnnnnnnnnnnnnnnnnnnnnnnnnnnnnnnnnnnnnnnnnnnnnnnnnnnnnnnnnnnnnnnnnnnnnnnnnnnnnnnnnnnnnnnnnn

SEQ ID NO: 215 - protein, 585 aa, glycine max
MKQEMEKRKGGRIEESDEEKWVHDASVDYKGRIPLRASTGVWKASLFVLAIEFSERIAHFGISSNLIMYLTEVMHEDLKTATNNANLWKGATTLLPMIGGFLGDAYTGRFRMVVFSSLVYFKGLSLLTMSQFIPNLKPCNNDICHQPRKVHEVVFFLALYCIALGTGGFKPCLESFGGDQFDGDNLEERKKKMSFFNWWTFTFSIALLLATTVVVYVQDFVSWGVAYLILAMFMALTIIAFYVGIPFYRYRMRPNANPFIPILQVLIASIRKRNLSCPSNPALLCEVPMSENSQGRLLNHTSRLRFLDKAAIVEEKYIEKKAGPWRLATVTRVEETKLILNVVPIWLTSLMIGVCIAQGSTLFVKQAAAMNLKISDNFKIPPASMASLSAFSTIISVPIYDRIIVPILRKVRGNERGISILGRIGIGLIFLVILMVVAALVENMRLRMPGHETMSVMWLIPQYLILGIGNSFYLIALQEYFYDEVPDSMRSVGMALYLSVIGIGFFLSSFLIIIVDHVTGKNGKGWIAKDVNSSRLDKFYWMLAVISALNLCLFLFLAKRFTYKTARRKATEIDCSNCDGVDTVA

SEQ ID NO: 216 - DNA, 2206 bp, glycine max
  CDS (83)..(1870)
agccaatattcatcgtatacttgaacaagcaaggctagtgtattccacttgcagcctgaaaccactagcatcatacgaaaagatggagaagaacaaagttgatgcaaatcctgaggaatttaacgatgagatgaaatgggttcgtgattcttcattggatcacaaaggaagagttcctctccgagcttcaactggttcttggaaagcttctatcttcattattgcaattgagtttagtgagagattgagctattttggaatagcaactagcttggtcatttaccttacaaaagttcttcatcaagaccttaagacagcagttaagaatgtgaactattggtctggtgtcaccactttgatgccattgttaggaggattcctagctgatgcttacttaggccgttacaccactgtgataacatcatgcatcgtttatctcatgggtttggttctgctttctttgtcatggttcataccaggtttcaaaccatgtgatcatactagtacatgcaccgaacctaggaggattcatgaggtggttttcttcctaggcatctatttaatatcagtaggaactggagggcataaaccttccttggagagctctggtgctgatcaatttgatgataataatgccaaagaaagaagtcagaaaatgtcctttttcaactggtggaacagtggtttgtgtagtggaatcattctaggagtgactgtgattgtgtatgttcaagaccatgtcaattggggggttgctgatatcgtcctcacaggggtcatggctgtctcattgctcatattcttgattggaaggtcttcttatcgttacaggacaccaattgggagccccttgactcctatgttgcaagttattgttgctgctatttccaaaagaaagcttccatatccttccaatccaactcaattgtatgaagtttccaagtctgagggcaacagtgaaagatttctggctcacaccaagaaactcaaatttcttgacaaggcagcaatccttgaaaatgaagggaacatagcagagaaacagagtccatggagacttgcaacagtaaccaaggttgaagaactgaagcttatcatcaacatgatccccatttgggtgttcacattaccatttggaatctgtgcttcccaaacctccactttcttcatcaaacaaggtgccatcatgaacagaaatataggcaataatggatttgtggttcccccagcttcaattttcactcttgcagccgttgggatgatactttcagtgaccatctatgacaagctccttgtgccagtgctaagaaaactaacaggaaatgacagaggaatcagcatcctccaaaggattggtattggaatggtcttctcagtcatcacaatgatagtggcagctttggtggaaaaaaagaggcttgaggcagttgaaatgaatggcccattaaagggttctttgtccatgagtgccctttggttggccccacaatttatgatcattggatttggtgatgggtttgctcttgtgggcttgcaagagtatttctatgaccaagtgcctgactcaatgagaagccttggaatagcactttaccttagtgtcattggggctgcaagttttcttagtagtttattaataacaattgtggatcatgtcactggtaagattgggaagagttggattggtaaggatttgaatagtagccgcttggacaaattttactggcttcttgcagccatcaccacattgaacttgttcatgtttgtgatctttgctcgcaagtataactacaagaatgtgcaaaaggtggcagcggctgattgctacgaaggcaaaagtgaggatgatggatcagagacttgggtttgagttggtggaattcagttctatgcagcttaattggcaaaaggtttcatcttctgattatcaaaatatatatatatttttctactattagaatccttaagttttatccttagcaaagcgttgataacttgtgctcctaaccaagagtttttgtttggtttagttgtttatggtgtccatgtaatatgacaataaaattatgtatgcgattgtcatttcaaaaggagtcattcatgttttcatcttattatctcgtgttttgggaaggtcttgccttttttttttttaagctaccttaacttcaccatcttgcactctgcaaagtctgaaatgacatat

SEQ ID NO: 217 - protein, 595 aa, glycine max
MEKNKVDANPEEFNDEMKWVRDSSLDHKGRVPLRASTGSWKASIFIIAIEFSERLSYFGIATSLVIYLTKVLHQDLKTAVKNVNYWSGVTTLMPLLGGFLADAYLGRYTTVITSCIVYLMGLVLLSLSWFIPGFKPCDHTSTCTEPRRIHEVVFFLGIYLISVGTGGHKPSLESSGADQFDDNNAKERSQKMSFFNWWNSGLCSGIILGVTVIVYVQDHVNWGVADIVLTGVMAVSLLIFLIGRSSYRYRTPIGSPLTPMLQVIVAAISKRKLPYPSNPTQLYEVSKSEGNSERFLAHTKKLKFLDKAAILENEGNIAEKQSPWRLATVTKVEELKLIINMIPIWVFTLPFGICASQTSTFFIKQGAIMNRNIGNNGFVVPPASIFTLAAVGMILSVTIYDKLLVPVLRKLTGNDRGISILQRIGIGMVFSVITMIVAALVEKKRLEAVEMNGPLKGSLSMSALWLAPQFMIIGFGDGFALVGLQEYFYDQVPDSMRSLGIALYLSVIGAASFLSSLLITIVDHVTGKIGKSWIGKDLNSSRLDKFYWLLAAITTLNLFMFVIFARKYNYKNVQKVAAADCYEGKSEDDGSETWV

SEQ ID NO: 218 - DNA, 2021 bp, oryza sativa
  CDS (77)..(1873)
ggcagctcctctatctagctagctactctactctactcgatcaagatcaagatctatcgtggacgcagcagcagccatggagaagcagcagcagccgggcggcgaggaggaggaggaggtgatcagcatggagaagcagcagcagccgggcgagaagaagatcaccggcggcgaggaggaggaggaggaggaggtgatcagcagcgtccggtaccgaggatggaagtcgatgccatacgtgatagggaacgagacgttcgagaagctgggcaccatcggcaccaccgccaacctgctggtgtacctcaccaccgtctaccacctccccagcgtccgcgccgccaccctcctcaacttcttctccggcaccaccaacctcgcccccctcctcggcgccttcctctccgacaccttcctcggccgctacaccaccatcgccgccgcctccctcgcctcctgcctcggcatgcttgtgcttaccctcaccgccgccatcccatctctccaccccccaccttgcactgcctcctcttcctcgtcgtcgtgccagggccccacacacggccagctcgccgctctcctcgccgccttcgccttcctcgtcgtcggcgccggcggcatccgcccctgcaacctcgccttcggcgccgaccagttcgacccgcgcaccgactccggccgccgcggcattgccagcttcttcaactggtactacttcaccttcaccgtcgccatgatgctctccgccaccctcatcatctacctccagagcaacgtcagctgggcgatcggactcgccgtccccgccgccctcatggccatctcctgcgcgctcttcttcatgggcacccgcctctacgtccgcgtccgccccgagggcagccccttcaccagcttcgcccgggtcatcgtcgccgccgtccgcaagcgccgcgtccccgcaccggcctccgccgacgacctgttcgacccgccgcaccagagcaagctggtggccaagatcgcgtacacggaccagttccggtgcctggacaaggccgccgtggtgacgccggagtcgagatcgagcccgtggcggctgtgcacggtgcagcaggtggaggaggtgaagtgcctggcgcggatcatcccggtgtggtcggcggggatcgtgtacttcatcgtggtaacgcagctgggcacgttcgtggtgctccaggcgctccagatggaccggcggctgacgaggtggtgggcgttcgaggtgccggcggggtcgatggtggtgttcaacatgatggcgatgacggtgtggatcccggtgtacgaccgggtggtggtgccggcgctgcggcgggtgacggggaaggagggcgggatcagccagctgcagcgcatcggggtggggctggtgctgtcggtggcgacgatggtggtggcggcggcggtggagcagcggcggcgccggctgggcgcggtgggagtgaagatgtcgttcctgtggctggtgccgcagcaggtggcggcggggatgtcggaggcgttcgcggcgatcgggcagacggagctgtactacaggcagttcccggagaacatgaggagcgtggcgggggcgctcttcttcctggcgttcgcgctggccaactacgcgagcggcttcatggtggcggcggtgcaccggaccacggggtggctggcgcaggatctgaaccacgcccgcctcgacctcttctacctaaccgtcgcggccatcgcggcggccaacgtctgctacttcctcctctgcgcccgctggtacaggttcaagaacaccaccatcgccgaccacgtcgagctgccggattatcatcatcatcagcccggaaccgccaacaccatagcctccaaggtttaattaattttattatcacaatcgatcactctactgtagatggtagatagatttagaggtacgtcatcgatcgatgcatcaccatacacagtaggagtataatatctgtatgtatcagacgcaaaaacactataatctcttcttcctcctc

SEQ ID NO: 219 - protein, 598 aa, oryza sativa
MEKQQQPGGEEEEEVISMEKQQQPGEKKITGGEEEEEEEVISSVRYRGWKSMPYVIGNETFEKLGTIGTTANLLVYLTTVYHLPSVRAATLLNFFSGTTNLAPLLGAFLSDTFLGRYTTIAAASLASCLGMLVLTLTAAIPSLHPPPCTASSSSSSCQGPTHGQLAALLAAFAFLVVGAGGIRPCNLAFGADQFDPRTDSGRRGIASFFNWYYFTFTVAMMLSATLIIYLQSNVSWAIGLAVPAALMAISCALFFMGTRLYVRVRPEGSPFTSFARVIVAAVRKRRVPAPASADDLFDPPHQSKLVAKIAYTDQFRCLDKAAVVTPESRSSPWRLCTVQQVEEVKCLARIIPVWSAGIVYFIVVTQLGTFVVLQALQMDRRLTRWWAFEVPAGSMVVFNMMAMTVWIPVYDRVVVPALRRVTGKEGGISQLQRIGVGLVLSVATMVVAAAVEQRRRRLGAVGVKMSFLWLVPQQVAAGMSEAFAAIGQTELYYRQFPENMRSVAGALFFLAFALANYASGFMVAAVHRTTGWLAQDLNHARLDLFYLTVAAIAAANVCYFLLCARWYRFKNTTIADHVELPDYHHHQPGTANTIASKV

SEQ ID NO: 220 - DNA, 2143 bp, zea mays
  CDS (134)..(1930)
caaacgttcctctcctcttccatcgtcgtcctcgctcccggccccgcctgtctagtcccctcttctcgcgtgcaccccctgtactgtacgtgctaggcacacagctagctgcagccacagcagggcacagcaaatggtttccggtgcgggtcatggtgggtacggcggcggcgacgacgggcaggccgtggacttccggggcaacccggcggacaagtcgaggaccggaggctggctgggcgccgggctgatcctgggcacggagctggcggagcgtgtgtgcgtgatgggcatctcgatgaacctggtgacgtacctcgtcggcgagctgcacctctccaactccaagtccgccaccgtggtgaccaacttcatgggcacgctcaacctgctcgccctcgtcggcggcttcctcgccgacgccaagctcggccgctacctcaccatcgccatctccgccacaatcgccgccacgggcgtgagcttgctgacggtggacacgacggtgccgagcatgcgtccaccggcgtgcctggacgcccgcgggccgcgcgcgcacgagtgcgtgccggcgcgcggcgggcagctggcgcttctgtacgcggcgctgtacacggtggcggcgggggccggcgggctcaaggcgaacgtgtccgggttcgggtcggaccagttcgacgggcgcgacccgcgggaggagcgcgccatggtgttcttcttcaaccgcttctacttctgcgtcagcctggggtcgctgttcgcggtcaccgtgctggtgtacgtgcaggacaacgtggggcggggctggggctacggcgtctccgcagtcgccatggcgctcgccgtcgccgtgctcgtggccggcacgccccggtacaggtaccgccgcccgcagggcagcccgctgacggcggtcggccgggtgctcgccgcggcgtggaggaagcgccggctgccgctgcccgccgacgccgccgagctccacgggttcgccgcggccaaggtcgcccacactgacaggctcaggtggcttgacaaggccgcgatcgtggaggccgagctggcggggaagcagcgggcgagcgcggcggcagcgtcgacggtgacggaggtcgaggaggtgaagatggtggcgaagctgctgcccatctggttcacgtgcatcctcttctggacggtctactcccagatgaccaccttctcggtggagcaggccacgcgcatggaccgccacctccgcccgggctccggcgccggcgccggcggcttcgccgtcccggccggctccttctccgtcttcctattcctctccatcctgctcttcacctcgctcaacgagcgcctcctcgtgccgctggccgcccgcctcacgggccgcccgcaggggctcacctcgctgcagcgcgtcggggccgggctcgcgctctccgtcgccgccatggccgtctccgcgctcgtagagaggaagcggcgcgacgcggccaacgggccggaccacgtcgccgtcagcgccttctggctcgtcccgcagtacttcctcgtcggcgccggcgaggccttcgcctacgtgggccagctggagttcttcatccgcgaggcgcccgagcggatgaagtccatgagcaccggcctcttcctcgtcacgctctccatgggcttcttcctcagcagcttcctcgtcttcgccgtcgacgccgccaccgcgggcgcgtggatccggaacaacctcgaccgcggcaggctcgacctcttctactggatgctggccctgctcggcgtcgccaacttcgccgtcttcgtcgtcttcgccaggcggcaccagtacaaggccaccagcttgccggcgtcggtggcgcccgacggcaccgggcacaaggagatggacgacttcgtcgcagtcacggaggccgtggaaggagtggacgtgtagggcgcgcatgtcaggctcacacttcatcggtgggtggcctctgctgtttaattttgcctttgggtagtgtgtatgtgtatggcgaagttttctttctcttgccagtttccagtttgctgctacttcggcctgctctcctgtaaataacataggagacatgctaattgaggccaagtctttatccagttagatcaacaagatattgaattgggc

SEQ ID NO: 221 - protein, 598 aa, zea mays; identical to SEQ ID NO: 32

SEQ ID NO: 222 - DNA, 2300 bp, zea mays
  CDS (541)..(2196)
  misc_feature (10)..(10): n is a, g, c or t
  misc_feature (14)..(14): n is a, g, c or t
  misc_feature (42)..(42): n is a, g, c or t
  misc_feature (50)..(50): n is a, g, c or t
  misc_feature (54)..(54): n is a, g, c or t
  misc_feature (60)..(60): n is a, g, c or t
  misc_feature (90)..(90): n is a, g, c or t
aacgaacaanaganagcagaacacgaccgaaacacaacaaancaccgagncgcngaggcnccccaccaccgacgaggcaggggcggaaanccggggggcggaccgccacccgcgagccgcccccttgcccaccacgcgcgaccggtatccggcgctaggagctgcggctgacagctcgggcgacaagcgggtccccgacagcgggagacaaggccccgttctcgattaacccaagccaaaggtccgttttctctctgagaccgtttacatcagttttttttcttttcttcaaaatatatgtgtgaacgaacaatagtttgcagtacacgaccgaaacacaatatttcatcgattccttccttgtcttctcacctctgacgattctgtttctgaaatctgcttcctgcaaaatggttccatggtcacggaattcgccatggtcagagtcagagggagagagagagagagagtcgtactggtcgtcacctgtcgaagattttcggtgtctcctgagccacagctgctgctgctgctggaaccatggagatggaggccgtggagtcgcacggcggcgccgggcgccggacgcccaagagggatcgcggcatctcctgggcctgcgtcttcatcctggcgagtaactgcttccagttcatcgcctacttcgccgtgtcgacgaacctggtgaactacctcaaggaccgcctgcaccagggcagcaaagccgccgcgaacggcgtcaccaactggatgggcacgagcgccatcacgccgctcgtcgccgccttcctcgccgacgccttcctcggcagatactggaccatcgcgctcttcctggtcatctccgtcctggcctacgtggtgctcacggtgagcgcggcggcggcgctggagagcgcggccttctacgcggggctgtacctgctggcgctgggcggggcgctgcagccggtgctgtcgtcgttcggcgccgaccagttcgacgaggaggagcgcgggcgccagagctccttcttcaactggttctacctctccatcaacgtcggctcgctgctcggcggcaccgtgctggtgtgggtgcagtccagcgtcagctgggggctcgggtacggcatcccggcgctcttcagcgcgctggccgtcgcggcgttcctggccggcaccgccacgtaccgccgccaccagccgccggccggcagcccgctcaccagggtcgcgcaggtcgtcgtcgccgcgtgcaggaagtgcggcgtccacgcgtccgaggacgcgtgggcggacgcgtgggtggacagcggcggcatgtccgcgatacaggggagccgccggctcgcgcacaccgatcagttcaggttcctggacaaggcagcgtcggtggagccatcggacgacaagtcgcgtccggcgagcgcgtggcgtctgtgcacggtgacgcaggtggaggagctcaagtgcgtgctccggctgctgccggtgtgggcgagcgggatcgtgttcgcggcggcgtacacgcagatgaccaccaccttcgtcctgcagggcgacacgctggacccgtacgtgggcggcttccgcgtgcccgccgccgtgctctccgtcttcgacacgctcagcgtcatgctgtgggtgccgctctacgaccgcttggtggtcccgctggcgcggcgcgccacgggccacgaccgcgggttcacgcagctggcgcgcatgggcgtgggcctcgtcgtgctcaccgccgccatgctcgccgcggggacgctggaggtggcgcggcgccgcgtcatcgcgcgttacggcatgtacgacaccaacacgggcgccggcggggacggggcgtacctgccgctgtccatcttctggcaggtgccgcagtacgtggtggtgggcgcgtcggaggtgttcacgttcatcggccagatggagttcttctacgaccaggcgcccgacgcgatgcggagcctctgctcggggctctccatgacgtccttcgcgctcgggaactacgtcagctccgcgctcgtcaccgtggtggcgcgcgccaccgcgcggggcgggcgggacggctggatccccgacgacatcaaccgggcgcacctcgacaacttcttctggctgctggccatgctctgcgccggaaacttcggcgtctacctgctcatcgcgcggtggtacacatacaagaagactgtggactagtatagtgtatgtatctataaagaccatccctgaacgatctcgtgaaatgtactgccgatctcaatcaattcaaagacacttcacttggaaaagtgggcgaatcc

SEQ ID NO: 223 - protein, 551 aa, zea mays
MEMEAVESHGGAGRRTPKRDRGISWACVFILASNCFQFIAYFAVSTNLVNYLKDRLHQGSKAAANGVTNWMGTSAITPLVAAFLADAFLGRYWTIALFLVISVLAYVVLTVSAAAALESAAFYAGLYLLALGGALQPVLSSFGADQFDEEERGRQSSFFNWFYLSINVGSLLGGTVLVWVQSSVSWGLGYGIPALFSALAVAAFLAGTATYRRHQPPAGSPLTRVAQVVVAACRKCGVHASEDAWADAWVDSGGMSAIQGSRRLAHTDQFRFLDKAASVEPSDDKSRPASAWRLCTVTQVEELKCVLRLLPVWASGIVFAAAYTQMTTTFVLQGDTLDPYVGGFRVPAAVLSVFDTLSVMLWVPLYDRLVVPLARRATGHDRGFTQLARMGVGLVVLTAAMLAAGTLEVARRRVIARYGMYDTNTGAGGDGAYLPLSIFWQVPQYVVVGASEVFTFIGQMEFFYDQAPDAMRSLCSGLSMTSFALGNYVSSALVTVVARATARGGRDGWIPDDINRAHLDNFFWLLAMLCAGNFGVYLLIARWYTYKKTVD

SEQ ID NO: 224 - DNA, 2760 bp, zea mays
  CDS (431)..(2416)
actcatctaaatttgactgactgccacctgcatgttcatggatagatccggcagcatatagcggcagggtgagatatttctagctactgcagtgtgcagcgcgggaacgtaggacggacggagcaggggtcccgtcgtcatcccacttcgtccctgtcgcgcttaatgctgccattaaactgactgcttgcagctcatccgtgctggcgagctccactaataaatgcgtgcgtatctgtgtgcatcgcggcagccggcagggaagggctggacacgattgcgcgtctgcgcttcagcctccagttcccggtgacgacgcccactagtctctactagataggcagcgccggctgctgctgctgccgccgccgatcagggcttcgcctcccctgttctcgcgaagatccgattgctttcgcccgccacccgcatggctccggcgtccgagacggagctgcaagcaccaccaccaccaccggcgtcggctaaggagatcaagtcgccggaggtgctgccggagccaggctcgctgtcagcgctgcagcgcaagaagctgggtgcgcacttcatggagagcgacgagcgccgcgtctcccgcgccaggacacctctcggcgccgcctatgaaccgccctccgccgccgctggcggcggcggcaccacgccggtcaacatccgcggcgagcccatccaggacctgtcgaggaccggggggtgggtggccgccttcttcatcttcggcaacgagatggcggagcgcatggcctacttcgggctctccgtcaacatggtcatcttcatgttcaaggtgatgcaccgcccgttcgccagctccgccaacgccgtcaacaacttcctcggcatctcccaggcgtcctccgtgctgggtggcttcctcgccgacgcctacctggggcgctactggaccatcgccatcttcaccaccatgtacctgctggggctcatcgcgctcaccgtgagcgccagcgtgccggcgctcgtgccgccgcaggagggctgcgacaagctcgccatgctgctgggcgcctgcgcgcccgcggcgccctggcagatggcctacctccagacggcgctctacgtgacggcgttgggcgcggcggggatccggccctgcgtctcctccttcggcgccgaccagttcgacgagcgcagccccgggtacaagcgccggctcgaccgcttcttcaacctcttctacctcgccgtcacgctcggcgccatcgccgccttcacggccgtggtctacatccagatgcagcacggctgggcggcggcgttcggcacgctggcgctggccatgggcacctccaacgcgctcttcttcgtgggcacgccgctgtaccgccaccggctgccggggggcagcccgctcacgcgggtggcgcaggtgctcgtcgccgccttcaggaagcgggacgcggccttcgacagcggcgacttcgtcggcctgtacgaggtcgccggcgccaagtccgccatccgtggcagcgccaagatcgaccacaccgacgacttcagatggctcgacaaggccgcgctgcagctggagggtgacctcgccggcggcgaggacgaggaggcggtgaacccgtggcgtctgtgcacggtgacgcaggtggaggaggtgaagatcctgctgcggctgctgccggtgccggcgtgcacggtgatgctgagcgtggtcctcaccgagttcctcacgctgtcggtgcagcaggcctacacgctgaacacccgcgtggcggcgctgcacctgcccgtgacgtgcatgccggtgttcccctgcctggccatcttcctcatcctggcgctctactaccagaccttcgccccgctggcgcgccgcctgacgggccacccgcacggcgcctcccagctgcagcgcgtcgggctgggcctcttcttctccatcctgtccgtggcctgggcggggctcttcgagcggtaccgccgcgggtacgccgtccgccacggatacctcggcctcttcctcacgcccatgccggacctcagcgcctactggctgctcatccagtactgcctcatcggcgtggccgaggtgttctgcctcgtcgcgctcctggagttcctgtaccaggaggcgcccgacgcgatgcgcagcgtcgggtccgcgtacgccgccgtcgccggcgggctcggctgctttgtggcgtcggcgatcaacaccgcggtggacgccgcgacgcgggacgatgaggaggggcggccgtcgtggctggcgcagaacatcaacgtgggcaggttcgactacctgtactggctgctcgccgtgctcagcacagtcaacctgctcgttttcgtcttctttgccaagcggtacaagtacagggtcagggtcgacgtgccgaccacagttgctgttgataagcagtagctagccgctagcgccattacaaggatttgagtttggatgtgctgtaactattgattactgggaataccataaaacatagatcttgtaccgtcgcggcaatagaatagaccagccggaactggtgcctggtggagtgggagcttcagccttgggcctccatctggagatcaagtatccggtgactgctgccagctcaggagcgtgatagcatgatgaaccacatcgtactgctgactgttcatcagtaattccccagttgctttagctttgctacaaaaaaaaaaaaaaaaggccgaactgctacagactattttttttggaaaaaaaaaaaaaaaaaagcggcc

SEQ ID NO: 225 - protein, 661 aa, zea mays
MAPASETELQAPPPPPASAKEIKSPEVLPEPGSLSALQRKKLGAHFMESDERRVSRARTPLGAAYEPPSAAAGGGGTTPVNIRGEPIQDLSRTGGWVAAFFIFGNEMAERMAYFGLSVNMVIFMFKVMHRPFASSANAVNNFLGISQASSVLGGFLADAYLGRYWTIAIFTTMYLLGLIALTVSASVPALVPPQEGCDKLAMLLGACAPAAPWQMAYLQTALYVTALGAAGIRPCVSSFGADQFDERSPGYKRRLDRFFNLFYLAVTLGAIAAFTAVVYIQMQHGWAAAFGTLALAMGTSNALFFVGTPLYRHRLPGGSPLTRVAQVLVAAFRKRDAAFDSGDFVGLYEVAGAKSAIRGSAKIDHTDDFRWLDKAALQLEGDLAGGEDEEAVNPWRLCTVTQVEEVKILLRLLPVPACTVMLSVVLTEFLTLSVQQAYTLNTRVAALHLPVTCMPVFPCLAIFLILALYYQTFAPLARRLTGHPHGASQLQRVGLGLFFSILSVAWAGLFERYRRGYAVRHGYLGLFLTPMPDLSAYWLLIQYCLIGVAEVFCLVALLEFLYQEAPDAMRSVGSAYAAVAGGLGCFVASAINTAVDAATRDDEEGRPSWLAQNINVGRFDYLYWLLAVLSTVNLLVFVFFAKRYKYRVRVDVPTTVAVDKQ

SEQ ID NO: 226 - DNA, 2308 bp, zea mays
  CDS (311)..(2011)
tgcggcgctcggccggccggtcgggagcaagatcggaacaaactcggtcgcatgcgcatcgcagcccttccacatgcgggtgggtgaggtggacgacttccgatagacggggtcgggcatggattgattggtggaggccgtgcccccgtgctcatgctcggcgaggacagttgttattattatcctccttcccttcttgtgcccttgcttggaccatatacctgaagtagcagcttcccttctccgtggaagaacaacagaagaaaagggggtaggtaatcttaggcgccggcggccgccggtccccgcgatggacacggagaccggagatacccggtctcccctgctgccgcatcaccctcccagccagacgcaggtatcctcagcgaatcagcactataacaaacccttcagctggaaggccccagccattattttggccttcgaattcttggagagcattgcttactctggtatagcactcaacctggtcgtgtaccttggaaccgtcctccatggaaccaccgcctccaatgcagcgaacgtcgatgcgtggaacggcgccacgtttcttacgccggtccttggagcctttcttgctgatacatactgggggaagtacaagaccgcagctatctccataatattctacgttgttggcctgctcataattaccacctctgccgtcataccgtccctacggcctgcctcgtgtgaaggcggttcatgcccacctgcaacagggtttcagtattttgtgctctttggttcattgtacctcatctccattggtacggggggcgtcaagtcagctttacttcccttgggagcagatcagtacaatgatgcgaacgccgaagagagtaaaagcaagcaactgttcttcagttggttcttcatggctgtcaaccttggagtgttcatctccggcactgttcttgtctggatacagcaaaatgtcgcttggtctcttggattcggcatctcctcgatatgccttgttatcgccgcagttgcctttttggttggaacaccgctttacagggttcaacttccaactgggagcccactcaagagtatagtcatggtgtttgttgcctcttataagaagagaggagtggcggttcctgctgatagcacactgttgtttgaagggaatgaatcaagcagcattgtgccgaacaaaattgaacacactgacgaattcaggtgcttagataaggctgctgtcgttgtagaggaccaagagatgaaggacagccatcgcccatggctattatgtacggtaacccaggtggaggaagtgaagattctgatccggatgcttccgatatggttcacctgtgtcttctattcggctgcaatgagccagactgctaccactttcgtccagcaggggaacgcgatgaacactaagatcgggtccttctcggtgccggcggcctccatgaactccgccgaggtgatcttcatgctcgtctgggttgtgttccaggacagcgtcgtcatcccgatagccaggaggtacacggggaacccgatggggctgacgctgctgcagcggatgggcgtcgggcggttgctggcgatcccatctctggcggccgccgcactggtggagacgtggaggctgcgcagcgtgaaggccgggcataacctgagcatcgggtggcagctcccgcagttcgtgatcctggcctgctccgacgtgttctgcggcatcgcgcagctggagttcttctacgcggaggcgcctgcgtccatgcgcagcctgtgctcggcattccagttcctggccatgtcgctggcgtactacgtgaacacgctggtggtcgcattggtggcgtccgtgaccacggcctggggcggcaagggctggctccccgctgacctcaacgacggccacctggactactacttctggctgtggacggggatcagtgtggtgaactacgtcgtgtacacggcatttgcaaggcgttatacggtcaagaaggttgtcggtcagtaaggatccagactatctgtatgatcaattactgtatcttattgtattttgcagtgtacactactccggaaccgagacttttggtgttcatttgaatgcatggtcctctgtacaagcctactagcgtactgtcttgtcttacgatttgtataacaatttcctggaaaaaggaagaggatttgtatgcatgtgtagattgggatgttgtgttagtgcctggagattggatgtttatttggctggtgcacaatctcccaatccatgatttttgataagattgacaaaaaaacatcttcaaca

SEQ ID NO: 227 - protein, 566 aa, zea mays
MDTETGDTRSPLLPHHPPSQTQVSSANQHYNKPFSWKAPAIILAFEFLESIAYSGIALNLVVYLGTVLHGTTASNAANVDAWNGATFLTPVLGAFLADTYWGKYKTAAISIIFYVVGLLIITTSAVIPSLRPASCEGGSCPPATGFQYFVLFGSLYLISIGTGGVKSALLPLGADQYNDANAEESKSKQLFFSWFFMAVNLGVFISGTVLVWIQQNVAWSLGFGISSICLVIAAVAFLVGTPLYRVQLPTGSPLKSIVMVFVASYKKRGVAVPADSTLLFEGNESSSIVPNKIEHTDEFRCLDKAAVVVEDQEMKDSHRPWLLCTVTQVEEVKILIRMLPIWFTCVFYSAAMSQTATTFVQQGNAMNTKIGSFSVPAASMNSAEVIFMLVWVVFQDSVVIPIARRYTGNPMGLTLLQRMGVGRLLAIPSLAAAALVETWRLRSVKAGHNLSIGWQLPQFVILACSDVFCGIAQLEFFYAEAPASMRSLCSAFQFLAMSLAYYVNTLVVALVASVTTAWGGKGWLPADLNDGHLDYYFWLWTGISVVNYVVYTAFARRYTVKKVVGQ

SEQ ID NO: 228 - DNA, 2403 bp, triticum aestivum
  CDS (239)..(1996)
  misc_feature (2296)..(2296): y is t or c
cgacccacgcgtccgcaccactccgactccaaattccttctcccaccccaactccctccctgaagactagccggtgctcgtgccgtgcccttcactgtttccggttggactttggaccctgcgtatccagatctacaagtttccctccctccatatattcagcttccgagcagagtatcccagccccaacccgccgttctctcgcgcgccgatcggaccggaggctcgccgttccaccatggcagaggccggcgaccccaccctggagcaggggctcctcgctgacccggaggaatcgaaccaacttacatacactggagatggatccgtcgacttttctggaaaccctgtcgtgaaggagaaaactggtagatggaaggcatgcccgttcatcttaggtaatgaatgctgcgagcggttggcctattatggcatctcgacaaaccttgtgacttatttgacgaaaaaactgcatgatggtaactcctctgctgctagaaacgtgactacatggcagggaacttgctatttgactccccttattggagctattctggctgatgcctactgggggaggtattggacgatcgcaacgttctccacaatatacttcattgggatgtcagtactgactctttcagcatcagttcctatgctcatgcctccatcttgtgaaggagtcatttgcccagaagccagtcctttgcagtataccgtattttttcttggtctttacctgattgcgctcggtactggtggaatcaagccatgtgtctcatcttttggagcggatcaatttgatgacacagatccggctgagcgaatccagaagggatctttcttcaattggttctatttttcaataaacattggtgctcttatatcaagcagttttctggtttgggtgcaagacaatttaggatggggattaggctttggcattccgacagttttcatgggtcttgccatcataagcttcttcgccggcacgtcactttatagattccaaaagccaggtggcagtcctatcacacgagtatgccaggtagttgctgccactttgcgcaagtggaatgcacatgttccagaggacagctctctcttgtatgagctaccagatggggtttcagcaatcgaagggagtcggcaattggagcacactgatgaactcagatgtctggacagggcagctacaattactgatcttgatgtgaaagaagatagcttcaacaacccatggcgggtatgcactgtcacccaggtggaagaactgaagatattggttaggatgttccctgtctgggcaacgacaattgtcttctcggctgtctacgctcagatgtccaccatgtttgtggaacaagggatggtgcttgatccaacaatcggctcattcaagatccctccagcatctctatccacctttgacgtggttagtgtcattatatgggttcctatctacgacagcatcctggtcccgatagccaggaggttcaccggcaaggagaggggcttttcagagctgcagcggatgggcatcggcctggtaatctccatcctagcaatgtcagcagccgcggtcctcgagataaagaggctggccatcgccagggaggcgcacctggtggaccagaacgtcccggttccgctgagcatcctgtggcaaatccctcagtacttcctggtcggcgcctcggaggtgttcaccttcatcggggcgcccgagttcttctacgaccagtcgccggacgccatgaggagcctctgcagcgcgctgcagctcatcaccaccgcgctcgggaactacctcagcgccttcatcctcacgatggtcgcctacttcacgaccaggggagggagacccgggtggatccccgacaacctgaacgaggggcgtctcgattacttcttctggctgctcgcggggctcagctttctcaactttttggtgtacgtgctgtgcgccaacaggttcaagagcaagaaagcggcttgagctttgatggtcagaaaagttcgatggcgtcaaggcagcttgcctgaaggtctaaaagacttgggtggtgtcatcgtgtacatgtatacttcgaaatctgtatatacgtttctcagtacatgatccctctgtttaactacgtgtttacttttttaacaagctgtaattctctctattagaagaggatccagtgcgggtcatggatctcctttcatgtacatatattttattcacttgaagttggcaagttcagcccatcacggagctgcagtctcctgtttagcattcagtttttatgtyttcttattaagatgtgtactgatatgttaatctttcgactcatgcataacgttggatcagcatgcatgttggagcaaaaaaaaaaaaaaaaaaaaactcgagactag

SEQ ID NO: 229 - protein, 585 aa, triticum aestivum
MAEAGDPTLEQGLLADPEESNQLTYTGDGSVDFSGNPVVKEKTGRWKACPFILGNECCERLAYYGISTNLVTYLTKKLHDGNSSAARNVTTWQGTCYLTPLIGAILADAYWGRYWTIATFSTIYFIGMSVLTLSASVPMLMPPSCEGVICPEASPLQYTVFFLGLYLIALGTGGIKPCVSSFGADQFDDTDPAERIQKGSFFNWFYFSINIGALISSSFLVWVQDNLGWGLGFGIPTVFMGLAIISFFAGTSLYRFQKPGGSPITRVCQVVAATLRKWNAHVPEDSSLLYELPDGVSAIEGSRQLEHTDELRCLDRAATITDLDVKEDSFNNPWRVCTVTQVEELKILVRMFPVWATTIVFSAVYAQMSTMFVEQGMVLDPTIGSFKIPPASLSTFDVVSVIIWVPIYDSILVPIARRFTGKERGFSELQRMGIGLVISILAMSAAAVLEIKRLAIAREAHLVDQNVPVPLSILWQIPQYFLVGASEVFTFIGAPEFFYDQSPDAMRSLCSALQLITTALGNYLSAFILTMVAYFTTRGGRPGWIPDNLNEGRLDYFFWLLAGLSFLNFLVYVLCANRFKSKKAA

SEQ ID NO: 230 - DNA, 2009 bp, Glycine max
  CDS (77)..(1858)
cacctactcaatcacgtttcttcctccctccattgaggggagcaacagaggtcatatatcaccaactgtactggcaatggagaaaggaagtatggagaacaatgagaaacatgtgacagagaatgatcctaagattgactacagaggatggaaggccatgccctttatcataggaaatgaaacttttgagaaattgggagccattggcaccttagccaatctcttagtctatctcactactgtattcaacctgaagaacatcacagccacaaatataatcaacatcttcaacggcagcaccaactttgctaccttcataggtgccttcttatcagacacctactttggccgctacaagacaataggattctgcacattcacttcatttctgggattgctagtgatacaacttacagcagtatttaagaatctgcatccacctcactgtggaaaggagatgaaaacatgcaaaggaccaactgcagggcaaatggcttttctagtgagtggatttggtttgctgctgattggtgctgctggagtcagaccatgtaacttggcttttggagctgatcaattcaatcccaatacagattcaggaaaaaaagggatcaacagtttcttcaattggtatttttttaccttcacttttgctcagatggtgtctttgacactgattgtgtatgtacagtcaaatgtgagctgggcaatagggttgggaattcctgctgctttgatgctcatatcttgtgtggtgtatttcatgggctccaaaatctatgtcaaagttgaacctagtggtagtcccatagctggtattgtgcaagtttttgtggttgcagtaaaaaaaaggagtataaaactacctgcagagcatccaatgctttccctcttcaactacgtgccgcctatgagtgttaactctaagcttccttacacgtttcaattcaggttattggacaaagcagccattgtgaccccaaaagataaaataaaaccagatggatctgcagcagatccatggaatctttgcagcatacagcaagtggaggaggcaaaatgtgtggtgagagtattgccaatatggtttgcagccatagtgtaccacttagtcattgtccaaatgcacacccttctagtgttccaagcccttcaatccgataggcgtcttggaagcagcaacttcaagatccctggtgcatcctttaatgtgttcttgatgttgagcatgaccttgtggctaccaatctatgacagaatagtggtccctttttctctgtcgaatacaccggaaaagagtggtggcatcacactccttcagagtgatggaattggcatttttatctctgcattgtgcatgatagtagccggtgtagttgaagagcatagaagaagtttggctctgacaaatcctattggagtgcaaccaagaaaaggtgctatttcatcaatgtcaggtctatggttaattcctcagttaagtctagccggtctatctgaatctttcactgctgttggacaagttgaattttactataagcaattccctgagaacatgagaagcattgcagggtcactattctactgtggcatggcagggtctagttatttgagcactcttctgatttcaattgttcacaatactagtgagaaatctgcgactgggaattggttaccagaagatcttaataaggggagattggatttcttttattacatgattgctgctctagaaatcatgaatttggggtactttctgttgtgttcaaaatggtacaagtataaggaaattggcagcagtgaccttgaactcaaccaagtacccaaacaatctgaaacatccaccattggtgtttaaaaaaaaaaactaagttaatgtatggaactataaagtagtgaaacaatttagacaaaagtattgtaacatggattaggaaacttttggtgtaatattcttaattagaaagactggaacaagggttactatgcaaaaaaaaaaaaaaaaaaaa

SEQ ID NO: 231 - protein, 593 aa, Glycine max
MEKGSMENNEKHVTENDPKIDYRGWKAMPFIIGNETFEKLGAIGTLANLLVYLTTVFNLKNITATNIINIFNGSTNFATFIGAFLSDTYFGRYKTIGFCTFTSFLGLLVIQLTAVFKNLHPPHCGKEMKTCKGPTAGQMAFLVSGFGLLLIGAAGVRPCNLAFGADQFNPNTDSGKKGINSFFNWYFFTFTFAQMVSLTLIVYVQSNVSWAIGLGIPAALMLISCVVYFMGSKIYVKVEPSGSPIAGIVQVFVVAVKKRSIKLPAEHPMLSLFNYVPPMSVNSKLPYTFQFRLLDKAAIVTPKDKIKPDGSAADPWNLCSIQQVEEAKCVVRVLPIWFAAIVYHLVIVQMHTLLVFQALQSDRRLGSSNFKIPGASFNVFLMLSMTLWLPIYDRIVVPFSLSNTPEKSGGITLLQSDGIGIFISALCMIVAGVVEEHRRSLALTNPIGVQPRKGAISSMSGLWLIPQLSLAGLSESFTAVGQVEFYYKQFPENMRSIAGSLFYCGMAGSSYLSTLLISIVHNTSEKSATGNWLPEDLNKGRLDFFYYMIAALEIMNLGYFLLCSKWYKYKEIGSSDLELNQVPKQSETSTIGV

SEQ ID NO: 232 - DNA, 2124 bp, Glycine max
  CDS (187)..(1917)
  misc_feature (90)..(90): n is a, g, c or t
aaataattatgtcctattggtggccataactccaaaagtggtggtgtgaacgcttgacaaagagtggttgcagtggcaaacaaactcatnagatcctccaaacctcaagcttaggctataaatactcaaatttgtggccatgttatgtactagaatccgaatagactaaaggggtgttttgaaaagatggagcagaaagaaaatcatgctagaaggaaaaagggagggctcatcacaatgcccttcatctttggtaatgaggtttgtgagaagctggctgtggtaggtttcaacacaaacatgattagctacttgacaacacagcttcacatgccattgaccaaagcagctaacaccctcactaactttggtggaactgcaagcttgacaccattgcttggtgctttcattgctgattcttatgccggaaagttctggactgtcacccttgcttccattatataccagatagggatgattagtttgaccctatcggcagtgctaccacagtttaggccacctccctgcaagggtgaagaggtgtgccagcaagcaagtgcaggacagctggcaatcctctacatctcactcctcctcggggcactcgggtcgggtgggatccgaccctgcatcgtggcgttcggggcggatcagttcgacgagtctgatcccaagcagacaacaaggacatggacctacttcaactggtactactttgtcatgggtgtagcaattcttgtggctgtgactgttttggtgtatattcaggacaatattggttggggaattggccttggaatccctaccattgcaatgttcctctcaattattgcattcattgtcggatacccgctttaccgtaacttgaacccgtccgggagcccgtttacccggttagtgcaagtggctgtggctgcatttcgtaagagaaaggtcccaaatgtgtcacaccctagtttactctaccaaaatgatgaactagatgcctctatttctatgggagggaagcttcttcacagtggacagatgaaatttttggacaaggcagcaatagttacagaagaagatgacaacaaaacacctaacttatggagattaaacacaattcatagagtggaggaattgaagtccataatcagaatgggtccaatatgggcatcaggaattctcctcatcacagcttatgcccaacaaaacacattctccctccaacaagccaagaccatggacagacacctaaccaaaacctttcaaatcccagctgggtccatgtctgtcttcaccatccttaccatgctcaccaccactgccttctatgaccgagtcttcatcaaagtggctcgtaggttcaccgggctggaccgtggcataagcttcctccacagaatgggcattgggtttgtgatctcaaccttagccacattggttgctgggtttgttgaaatgaaaagaaagaaggcagctttggcccatgggctttttgaccacccacatgccataatcccaatctcagtgttctggcttgtccctcaatacagccttcatggaatggctgaggcctttatgtcaattggacacttggagtttttctatgaccaggcccctgagagtatgaggagcactgccatggcattattttggactgctatcgctgctgggaactatgtgagtaccattatggttactttggtccacaagttcagtgctgggtctaatgggtcaaattggctccctgacaacaacctcaacaaagggaagttggagtacttttactggcttatcaccatattgcagtttctcaatcttatttactacttggtttgtgccaaattgtacacctacaagccaattcaggtccatgacaaaggggatagcaattcagaagggaaccaaattgagctctctaccacggtttaagtgtggtgttgtagggattaagtggtttagatttagagtttcttacccttttagtgtccatgcttagagattgggagtctcacgtgttgtatataaataataaatactaatattaattactaaaatagttgaaaaagtgcttccattagcttgtatacttaaacatgtctttactataaataatgattgttgctacaaaataacaga

SEQ ID NO: 233 - protein, 576 aa, Glycine max
MEQKENHARRKKGGLITMPFIFGNEVCEKLAVVGFNTNMISYLTTQLHMPLTKAANTLTNFGGTASLTPLLGAFIADSYAGKFWTVTLASIIYQIGMISLTLSAVLPQFRPPPCKGEEVCQQASAGQLAILYISLLLGALGSGGIRPCIVAFGADQFDESDPKQTTRTWTYFNWYYFVMGVAILVAVTVLVYIQDNIGWGIGLGIPTIAMFLSIIAFIVGYPLYRNLNPSGSPFTRLVQVAVAAFRKRKVPNVSHPSLLYQNDELDASISMGGKLLHSGQMKFLDKAAIVTEEDDNKTPNLWRLNTIHRVEELKSIIRMGPIWASGILLITAYAQQNTFSLQQAKTMDRHLTKTFQIPAGSMSVFTILTMLTTTAFYDRVFIKVARRFTGLDRGISFLHRMGIGFVISTLATLVAGFVEMKRKKAALAHGLFDHPHAIIPISVFWLVPQYSLHGMAEAFMSIGHLEFFYDQAPESMRSTAMALFWTAIAAGNYVSTIMVTLVHKFSAGSNGSNWLPDNNLNKGKLEYFYWLITILQFLNLIYYLVCAKLYTYKPIQVHDKGDSNSEGNQIELSTTV

SEQ ID NO: 234 - DNA, 2283 bp, Sorghum bicolor
  CDS (301)..(2064)
atcccgactccattccggcaccaaccctagctcccgaagggccggaggtgcccaatatcaacggaccaccggaacagcaacagtagcggggcgccggtgccgtttccttcactcattccgcccctgagacgtacccagatctacaagctactccagtcgacttccataaattcgactcccgcgattccaccttggagttggaccggccgtttttgcttcctcgccgaaaacagaatatccgatcaggcgtagtgttcttaggcttcgctgcccctactacgtcttcgccgggatcggtccatggccggcgccgagcgcgcggaggcggtcgctctggaggaagggctcctcgctccggaggaatccaaccaagtagtatacactggagatggatcagtcgacttttcgggaaatcctgttgtcaaggaaacaacgggtagatggaaggcatgtccattcatattaggtaatgaatgctgtgaacgactggcctattatggcatctccacgaaccttgtcacttacttgacaaaaaagctacatgctggcaatgcctctgctgctagcaatgtgactacatggcagggaacttgctacttgactccgcttattggggcaatcctggctgatgcatactgggggaggtattggacgattgcaacattctccacagtatacttcatcgggatgtcaatactgactctttcagcatcagttcctatgctcatgcctccatcttgtgaaggatccttttgcccacaagcaagcccttttcagtatactgtatttttccttggtctttatctgattgccctgggtactggtggaattaagccttgtgtctcatcctttggagcggatcaatttgatgatacagatccagctgagcgaatccagaagggttctttctttaattggttctatttttcaataaacattggtgctctcatatcaagcagctttctggtttgggtgcaagacaatgtaggatggggactgggctttggcattccgactgtattcatggggctggcaatcataagtttcttctctggcacatcactttataggttccaaaaaccaggaggtagtcctattacacgagtatgccaggtgattgttgcctctttgcgcaagtggaatgtgcctgccccagaggacagctctctcttgtatgagctacctaatggggtatcaacaattgaggggagtcggcaaatagagcacacagatgaactcagatgtttagacaaggctgctacagttaccgaagttgatgtgaaaatggctgacttcagcaacccatggcggatatgcactgtcacccaggtggaagaactgaagatactagtaaggatgttccctgtctgggcaacaacaatagtgttttctgctgtatatgctcaaatgtcgacaatgttcgtggaacaagggatggtgcttgacccatcgttgggttctttcaagattcctccagcttcactgtctacctttgacaccctaagtgtcatcgtatgtgtcccgatgtacgattacattgtggttccaatagccaggagattcaccggcaacgagaggggctttacagagttgcagaggatgggcattggcctggtcatttccatccttgctatgtcggtcgctgcaatcctcgaaatcaagcggctagcagttgccagggaagcacacctggtggatcagaatgtcccggtcccactgagcatattctggcaaatccctcagtatttcctgattggtctagcagagattttcacattcatcggagcgcttgagttcttttatgaccagtcaccagacgccatgaggagcctctgcagtgcacttaatcttctcactactgcgggtgggaactatctcagcacgttcattttgacaatggtcgcgtactttactacgaggggaggtaaccctggatggattcctgacaacttgaacgaagggcatcttgattacttcttctggctccttgctggcctcagttttctgaacctgattgtatatgtcatctgtgctggcaaatacaagggcaagaaggcagcttgagttgtgaaggtcaggaactggacggctcgccatgtttccttggacacttattaacttcaacaatctgtatatatgtttcccacattcactctagctgaagcaacgatctgtaattgttgggaagcttttatttctcattttactgtactaaattgattttacattcgtacttccactttctgtatatattgctgaatatatggacatctcacttttcgc

SEQ ID NO: 235 - protein, 587 aa, Sorghum bicolor
MAGAERAEAVALEEGLLAPEESNQVVYTGDGSVDFSGNPVVKETTGRWKACPFILGNECCERLAYYGISTNLVTYLTKKLHAGNASAASNVTTWQGTCYLTPLIGAILADAYWGRYWTIATFSTVYFIGMSILTLSASVPMLMPPSCEGSFCPQASPFQYTVFFLGLYLIALGTGGIKPCVSSFGADQFDDTDPAERIQKGSFFNWFYFSINIGALISSSFLVWVQDNVGWGLGFGIPTVFMGLAIISFFSGTSLYRFQKPGGSPITRVCQVIVASLRKWNVPAPEDSSLLYELPNGVSTIEGSRQIEHTDELRCLDKAATVTEVDVKMADFSNPWRICTVTQVEELKILVRMFPVWATTIVFSAVYAQMSTMFVEQGMVLDPSLGSFKIPPASLSTFDTLSVIVCVPMYDYIVVPIARRFTGNERGFTELQRMGIGLVISILAMSVAAILEIKRLAVAREAHLVDQNVPVPLSIFWQIPQYFLIGLAEIFTFIGALEFFYDQSPDAMRSLCSALNLLTTAGGNYLSTFILTMVAYFTTRGGNPGWIPDNLNEGHLDYFFWLLAGLSFLNLIVYVICAGKYKGKKAA

SEQ ID NO: 236 - DNA, 3134 bp, Zea mays
  CDS (249)..(2033)
cctcgagggcccggcccgggaatcaaaaaaaaaaaaaaaaaaaaaaaaaaaaaaaaaaaaaaaaaaaaaaaaaaaaagggcaccggttgtggcttaatttaatatatgtactaaataagcacatgatatgttttcataaataagtggagtggaggcaggcagcgagggacgctaggcaccgttgtggctgtgcggaactgcacaagagcgtttcgcctcggccaccacgaacggagaaggcggcagccatggccatggaggaagcggggaagatgacgtgcaggaagaagggtggtctgagaacaatgcccttcatcttcgccaacgaggtggcggagaagctcgccgtggtgggtttctcgaccaacatgctgacgtacctgaccactcagctgcacatgccgctagcgaaggccgccaccacgctcaccaacttcggcggcacctccgccgcgacgcccctcatcggtgccttcctcgccgacgcctgcatcggccggttctggaccatcgccgccgcgtccgtcgtctaccaagccggcatggcgctcctgacggtgtcagcggcgctgccgcggttccggccggcgccgtgcaagccgggcggcgcggtggcatgccaggaggccgcgccgtggcagctggcggtgctgtacgtgtccctgctcctgaacgcggtgggcgcgggcgggtaccgcccctgcatcgtggcgttcggggcggaccagttcgacgagtcgcgggcggcggagcgcgcgcggagctggggcttcttcaactggtactacttctgcaacggcgcgtccatgctgctggccgtcacggcggtggtgtacgtgcaggacaacgtgggctggggctggggcctcggcgtgccggccttctgcatgggcgtctccgtcgccgccttcgtggccgggtacccgatgtaccggaggctggagcccgcggggagcccgttcacgcggctcgcgcaggttgtcgtcgccgctgtcaagaagcggcggctgccggcggcggacgtcaaccccgcgttgctgtacgaggacgacgagctcgacgcgcccatctccatgtacggcaagcttgtgcacacggatcagctcagcttctttgaccgcgcggcgatcgtcaccgacggcgacctggtcacgctgacggacgcggactccggcaagccgtcgacggcccccgtcccggacctgtggcgcctgagcaccgtgcaccgcgtggaggagctcaagtcggtgatccgcatgggtcctatctgggcggcgggcatcctggtgatcacggggtcgtcgacgcagaacaccttctctctgcagcaggcgagcaccatggaccgccgcctcgcgccgggcctctccacgttcgagatccccgcggggtccatgaccgtcttcgggctgctggccatgctcttcaccctcttcgtctacgaccgcgcgctcatccgcgtggcgcgccgcttcacggggctggaccgcggcatctccttcctgcaccgcatgggcgtcggcttcgccatcagcgtgctcgccaccctggtcgctggattcgtggagcggcaccgcagggacgcggcggcggcggccggcgccacggacgccggcacgtccccgctgtcggcctactggctggtgccgcagtacgcactgcacggcgtggccgaggcgttcacctccgtggggcacctcgagttcatgtacgaccaggcgcccgagagcatgcgcagcacggcgacggcgctcttctggctgtccatctcgctgggaagctacgcgagcacgctgctggtggacgctgtgcaccgctggagcgcggggcccggcggcgccaactggctgccggacaacatcaatcacggcaagctggattacttttactgggtcgtcacggtactgcaggtcatgaaccttgtgtactacgccatttgcgccaagcggttcacgttcaagccagtgcagctccacaagaaagaggaggaagaaggcggcaaggcacttgtggagttgcaagagaaggtttaatttgagcagcatgcactttcatcagtgctaggaagatcctcagaaaaactcccaaggtattactatataaatctatgtgagcatctgtattagtcaagtagatcaagaatgcaggaaggttgttcaggcaagcaacctcagaagctatctggtctggtcctgagacttggcacaggtcaaaaacacaactcgactatatttgtaactagaaagcaggcacgaggcacatgtctgaactctgaaacttgacgttaatgcatagtactgtataagactctgtttgtacattagagtctagggataaacacacagatattgttcaggcaacagtcttcgaaaagttgtcacgcaacacatctctcagagacagaaatatttcgatctgaatcctggcatagcttattaatattccgacttggacactaggtagtaaggaaacaggtttgcacccacaatctggcatgaattccaacccaagcagatagcggagcttttcaggtaaacagactacggtacattagatgtcgcctctgatctttaatcgcagattcgcagtagtagtgcacgaatagaccgtccaagaacgcgcggcgagacgcgaacctgtcgcgggacggggggatcagacggtgaacttgatctcgaacccggtggacggatccacgggctcggccgtggacgggacgacggcggtgacggtggcggctggggggccgacggggaggcggcgggttatcatgtcttcgatcttcgcggggtctccggagaggagggcctccacactgccgtcacggcggttgcggacccagccggcgagaccgagcgactcggccgtggacgccgtccagtcgcggaaccccacccccgtgacgctccccttcaccaccacgcggactgccttccgtgcgggctccggctgcggcgcggatggtggcgtggcggcatcgggatcggcggaggacgccatggcgcggtggtgctggtacggttgtggacttgtggaagcagcgagactggagaccggagacggagagggacgaccggacgagacgagacggccgaagcaaggaactgctccccggccggccccgaggtacccaa

SEQ ID NO: 237 - protein, 594 aa, Zea mays
MAMEEAGKMTCRKKGGLRTMPFIFANEVAEKLAVVGFSTNMLTYLTTQLHMPLAKAATTLTNFGGTSAATPLIGAFLADACIGRFWTIAAASVVYQAGMALLTVSAALPRFRPAPCKPGGAVACQEAAPWQLAVLYVSLLLNAVGAGGYRPCIVAFGADQFDESRAAERARSWGFFNWYYFCNGASMLLAVTAVVYVQDNVGWGWGLGVPAFCMGVSVAAFVAGYPMYRRLEPAGSPFTRLAQVVVAAVKKRRLPAADVNPALLYEDDELDAPISMYGKLVHTDQLSFFDRAAIVTDGDLVTLTDADSGKPSTAPVPDLWRLSTVHRVEELKSVIRMGPIWAAGILVITGSSTQNTFSLQQASTMDRRLAPGLSTFEIPAGSMTVFGLLAMLFTLFVYDRALIRVARRFTGLDRGISFLHRMGVGFAISVLATLVAGFVERHRRDAAAAAGATDAGTSPLSAYWLVPQYALHGVAEAFTSVGHLEFMYDQAPESMRSTATALFWLSISLGSYASTLLVDAVHRWSAGPGGANWLPDNINHGKLDYFYWVVTVLQVMNLVYYAICAKRFTFKPVQLHKKEEEEGGKALVELQEKV

SEQ ID NO: 238 - DNA, 3334 bp, Zea mays
  CDS (1305)..(3074)
cattgggaccctcgaggccggccggccggcacgtaatttcctccgaaacgctagaagcggggcccacccgaaacgcgagacctatcctcttcttcccgtggcacggccaattttgcttccggctgccgctcttctccgccgccgccccgatccccttcctccccaagcccttcaactatccactcccgcgtccccggagaagcggcgagatgtacggcatcctgacctccccctgccctcgagccccgcttctccgcgctctcccgagcccatccgcccgcgcattccccagaacactagccttccccgcgaggcccctcccccgcggtctccgcctgacccctccgcacgccgccgcggaggcatcggcggcagccacggcgttgggcgggcttctggcgtcgccgctctcgactctggaggccgccctgcggggcctcaacctcgcgccccttcgcgcccccgtggcggcggcgatgtcggcggccgtgcggtggctgggagtgtaccgggaggtgctgctcgtcggcgtgctgctctcctggttccccaacatcccctgggaccgccagcccttctcggccctgcgcgacctctgcgaccccttcctcgccctgtgccgtgaggtcatgccccccgtgttcgggcgcaagctcgacctcagcccgcttgttgcattcatggctattgacatcatcatcatgatcctgcgcccgcagccacgcatgtgatgactccctgcagcagtgggtttggacgatgtatgttggtatgttaggctctgactgcaggaacaaggatctaaggctgttttcggtcatcagatggcaaagaaaggtgctgtgccgctcacctgtatcagtacacaagtgcggtggttggttggattagttttgcgatcttagcatagcggttatggagggtgtaatgcaatataaatgatttcgatgtggcttcattgccaaaactttctttttcgcgtgtcctgtggttgttgtagtaatatgtgttggctacgtttacgtattggttatcccagttttggtctgtgctcacccaaaaaaaaaaaaaaaaaaaaaaaaaaaaaaaaaaaaaaaaaaaaaaaaaaacatgtaccgcccggcggggcggggattactgacaagcgccagagcagagagggagagatagaacacacaaggggagaggggtggggaagggaaggcgaagggaggcgcactcgtcccgtctggtgctctggtatcgtctccccccggcagggaaggagtagaaggaaggagagtacgtaggaggaggaggggagaatgcgtgtcggcggcgggcgggacgacgacgacgaggtgtcccggaagctcaagagcatggacgtggacaagctggagaacggcggcagggaggagagcccgcggcccgccgtcaagtaccacggctggaaggccatgccgttcatcatcgggaacgagacgttcgagaagctggggacgctaggcacgtcggcgaacctgctggtgtacctgacgcaggtgttccacatgcggagcgtggacgcggcgacgctactcaacgggctcaacggcaccaccagcctcgcccccatcatcggcgccttcctctccgacgcctacctcggccgctacctcgcgctcgccatcgcctccgtcgcctccctcatcggcatgttcctgctgacgatgacggccggcgcgaacagcctgcacccgccggagtgcagcgtgggcgagacctgcgagaaggcgacgtcgtaccagttcgcggtgctcttcgtggccttcgcgttcctggtgctgggctcggcggggatccgcccctgcagcatgcccttcggcgccgaccagttcgaccccaacacggagtctggcaagcgcggcatcaacagcttcttcaactggtactacttcaccttcacggccgccatgatgatctccgccaccgtcatcatctacgtgcagagcaacgtgagctggcccatcgggctgggcatccccacggcactcatgttcctggcatgcgtgctcttcttcgtgggcacgcgcctatacgtgcgggtgacgcccgaggggagccccttcaccagcgtcgtgcaggtgctatcggccgcgctcaagaagcggtcgctgaagcagcccaaggacccgaagcaggacctcttcgacccgccgcacaccagcgccatcgtcaccaagttggcgcacacggaccagttccgctgcctcgacaaggcggccatcgtggcatccccggacgaggtgcgttccggcggcggcgcgcccgcggacccctggaggctctgcagcgtgcagcaggtggaggaggtcaagtgcctcatccgcatcgtgcccgtctggtccacggggatcatctactacgtcgccgtggtgcagcagtccacgtacgtggtgctctcggcgctgcagtccgaccgccacctcggcggcgccggcttccagatccccgccgcgtccttcaccgtcttcgccatgctcgcgcagacgctgtggatcccgttctacgaccgcctcctgctgcccaagctccggaagataaccggcaaggaagaggggttcacgctgctccagcgccagggcatcggcatcgcgctctccaccgtcgccatggtcatctctgccatcgtcgaggaccggcgccgtgccatcgcgctcagccagccgacactcggaaccaccatcaccggcggggccatctcggccatgtccagcctgtggatggtgccgcagctcatgatcctgggcctatcggaggcattcaacctcatcagccagattgagttctactacaaggagatcccggagcacatgcggagcgtggcgggggcgctcgcattctgcaacctggcgctcggcaactacctcagcggcttcctggtgaccatcgtgcaccggaccacggggtccgggcagaactggctggcgcaggacctcaacaagggccgcctcgacctcttctactggaccatcgcaggcatcggcgtctttaatctcatctactttgtcatctgcgccaggtggtacaggttcaaggggaccagcaactgatccgccaggttcatggttggacaggttggtggggttggataattatgttatggcctctctcttttttgtttattactttatacctttgttactggtcctttcatttgaatctataggatgatcaagtggctgatgaaagaggagaaagaaacaaaatagttggtttcttgtaatttgtaagtggttaaactgaaatacaaatggatgtaagcttgaatgaaagaaaagcacagcggccaaaaaaaaaaaaaaagcggccc

SEQ ID NO: 239 - protein, 589 aa, Zea mays
MRVGGGRDDDDEVSRKLKSMDVDKLENGGREESPRPAVKYHGWKAMPFIIGNETFEKLGTLGTSANLLVYLTQVFHMRSVDAATLLNGLNGTTSLAPIIGAFLSDAYLGRYLALAIASVASLIGMFLLTMTAGANSLHPPECSVGETCEKATSYQFAVLFVAFAFLVLGSAGIRPCSMPFGADQFDPNTESGKRGINSFFNWYYFTFTAAMMISATVIIYVQSNVSWPIGLGIPTALMFLACVLFFVGTRLYVRVTPEGSPFTSVVQVLSAALKKRSLKQPKDPKQDLFDPPHTSAIVTKLAHTDQFRCLDKAAIVASPDEVRSGGGAPADPWRLCSVQQVEEVKCLIRIVPVWSTGIIYYVAVVQQSTYVVLSALQSDRHLGGAGFQIPAASFTVFAMLAQTLWIPFYDRLLLPKLRKITGKEEGFTLLQRQGIGIALSTVAMVISAIVEDRRRAIALSQPTLGTTITGGAISAMSSLWMVPQLMILGLSEAFNLISQIEFYYKEIPEHMRSVAGALAFCNLALGNYLSGFLVTIVHRTTGSGQNWLAQDLNKGRLDLFYWTIAGIGVFNLIYFVICARWYRFKGTSN

SEQ ID NO: 240 - DNA, 2266 bp, Zea mays
  CDS (204)..(1979)
  misc_feature (2264)..(2264): n is a, g, c or t
  misc_feature (2265)..(2265): n is a, g, c or t
cattgggacctcgagccggcgggaacattgggtacctcgaggccggccgggcttcggattactgacaggcgccagagagagagagaccacaactcctcgagacaccacaagggcaagggaggcgcgctcctctcgcctcgcctcgcctcccccggggaagaagaggaggagagggagctgagcagcagccggccgacgcgggaatgctcgtcggcggcgggcgggacgacgaggaggtgctccggaagctcaagagcatggacgtggacaagctggagaacggcggaggcggcggcgacgcggagagcccgcgccccgtcgtcaagtaccacggctggaaggccatgcccttcatcatcgggaacgagacgttcgagaagctgggcacgctgggcacgtcggccaacctgctggtgtacctgacgcaggtgttccacatgcggagcgtggacgcggccacgctgctcaacgggctcaacggcaccaccagcctcgcccccatcgtcggcgccttcctctccgacgcctacctcggccgctacctcgcgctcgccatcgcctccatcgcctccctcatcggcatgttcctgctgacgcttacggccggcgcggacagcctgcacccgccggaatgcggcgtgggcgaggcctgcgagaaggcgacgtcgtaccagttcgcggtgctcttcgtcgccttcgcgttcctggtgctgggctcggcggggatccgcccctgcagcatgcccttcggcgccgaccagttcgacccccacacggagtccggcaagcgcggcatcaacagcttcttcaactggtactacttcacgttcacggcggccatgatgatctccgccaccgtcatcatctacgtgcagagcaacgtgagctggcccatcgggctgggcatccccacggcgctcatgttcctggcctgcgtgctcttcttcatgggcacgcgcctctacgtgcgggtgacgcccgaggggagccccttcaccagcgtcgtgcaggtgctgtcggccgcgctcaagaagcggtcgctgaagcagcccaaggacccgaagcaggacctcttcgacccgccgcacaccagcgccatcgtcacccagctcgcgcacacggaccagttccgctgcctcgacaaggcggccatcgtggcgtcccaggacgagttgcgccccggcggcgccgcgcccgcggacccctggaggctctgcagcgtgcagcaggtggaggaggtcaagtgcctcatccgcatcgtgcccgtctggtccacggggatcatctactacgtcgccgtggtgcagcagtccacgtacgtggtgctctcggcgctgcagtccgaccgccacctcggcggcgccggcttccagatccccgccgcgtccttcaccgtcttcgccatgctcgcgcagacgctgtggatcccgttctacgaccgcctcctgctgcccaagctccggaagataaccggcaaggaagaggggttcacgctgctccagcgccagggcatcggcatcgcgctctccaccgtcgccatggtcatctctgccatcgtcgaggaccggcgccgtgccatcgcgctcagccagccgacgctcggaaccaccatcaccggcggggccatctcggccatgtccagcctgtggatggtgccgcagctcatgatcctgggcctatcggaggcattcaacctcatcagccagattgagttctactacaaggagatcccggagcacatgcggagcgtggcgggggcgctcgcattctgcaacctggcactcggcaactacctcagtggcttcctggtgaccatcgtgcaccggaccacggggtccgggcagaactggctggcgcaggacctcaacaagggccgcctcgacctcttctactggaccatcgcaggcatcggcgtctttaatctcatctacttcgtcatctgcgccaggtggtacaggttcaagggaaccagcaactgatccgccgaggtgaccatatatcgtctctctcatggttggacaggttggtggggttggataattatgttatggcctctctctttttttgtttattactttatacctttgttactggtcctttcatttgaatctataggatgatcaagtggctgatgaaagaggagaaagaaacaaaatagttggttttttgtaatttgtaagtggttaaactgaaatacaaatggatgtaagcttgaatgaaagtttagcacagttaccgaccagcttatgattgccaaaatatannt

SEQ ID NO: 241 - protein, 591 aa, Zea mays
MLVGGGRDDEEVLRKLKSMDVDKLENGGGGGDAESPRPVVKYHGWKAMPFIIGNETFEKLGTLGTSANLLVYLTQVFHMRSVDAATLLNGLNGTTSLAPIVGAFLSDAYLGRYLALAIASIASLIGMFLLTLTAGADSLHPPECGVGEACEKATSYQFAVLFVAFAFLVLGSAGIRPCSMPFGADQFDPHTESGKRGINSFFNWYYFTFTAAMMISATVIIYVQSNVSWPIGLGIPTALMFLACVLFFMGTRLYVRVTPEGSPFTSVVQVLSAALKKRSLKQPKDPKQDLFDPPHTSAIVTQLAHTDQFRCLDKAAIVASQDELRPGGAAPADPWRLCSVQQVEEVKCLIRIVPVWSTGIIYYVAVVQQSTYVVLSALQSDRHLGGAGFQIPAASFTVFAMLAQTLWIPFYDRLLLPKLRKITGKEEGFTLLQRQGIGIALSTVAMVISAIVEDRRRAIALSQPTLGTTITGGAISAMSSLWMVPQLMILGLSEAFNLISQIEFYYKEIPEHMRSVAGALAFCNLALGNYLSGFLVTIVHRTTGSGQNWLAQDLNKGRLDLFYWTIAGIGVFNLIYFVICARWYRFKGTSN

SEQ ID NO: 242 - DNA, 1743 bp, Zea mays
  CDS (1)..(1743)
atgggagaagttgaggacatgtacacccaagacgggaccgtggacatgaaagggaatcccgccgtgaagaagggcaccggcaactggcgcgcctgcccctacatcctcgcgaacgagtgctgcgagaggctggcttactatggcatgagcaccaacctggtgaactacatgaagacccgacttggccaggtgaactccgttgcctccaacaacgtcaccaactggcaagggacgtgctacatcacgccgctcatcggcgccttcttcgccgacgcgtacatggggaggttctggaccatcgccatcttcatgatcatctacattttcggcctggcgctgctgacgatggcttcgtcggtgaaggggctggtgcctacgtcgtgcggcgacaaggatgtgtgccacccgacggacgcgcaggcggcggtggtgttcgtggcgctgtacctcatcgcgctgggcacgggcgggatcaagccgtgcgtgtcctccttcggcgccgaccagttcgacgagaacgacgagcgggagaagaagagcaagagctccttcttcaactggttctacttctccatcaacatcggcgcgctggtggcgtccacagtgctggtgtacgtgcagacgcacgtgggctggggctggggcttcggcatccccgccgtggtcatggccatcgccgtcggcagcttcttcgtgggcacgccgctgtacaggcaccagaagcccgggggcagcccgctgacgcgcatcgcgcaggtgctcgtcgcgtgcgcgcgcaagtggaacgtggccgtgcccgcggacaagtcgcggctgcacgagacggtggacggggagtccgtcatcgaggggagccgcaagctggagcactcggagcagctggcgtgcctcgacagggctgccgtggtgacggccgaggacggcgcggaggcgagcccgtggcgcctgtgctcggtgacgcaggtggaggagctcaagagcgtgatccggctgctgcccatctgggccagcgggatcgtgttcgcggcggtgtactcgcagatgagcaccatgttcgtgctgcagggtaacacgctggaccagagcatggggccccggttcaagatcccctcggcgacgctgtccatggtggacactatcagcgtcatcgtctgggtccccgtgtacgaccgcgccatcgtgcccctggtgcgctcttacaccgggaggccgcgcgggttcacgcagctgcagcgcatgggcatcggcctcgtcgtctccatcttctccatggtggcggcgggcgtgctggacatcgtgcggctgcgcgccatcgcgcggcacggcctgtacggcgagaacgacatcgtgcccatctccatcttctggcagataccgcagtacttcatcatcggatgcgcggaggtgttcaccttcgtggggcagctggagttcttctacgaccaggcgcccgacgccatgaggagcatgtgctccgcgctgtcgctcaccaccgtcgcgctcggcaactacctcagcacggtcctggtgaccatcgtcacccacatcaccaccaggcacggccgcatcgggtggatcccggagaacctcaaccgcggccacctcgactacttcttctggctgctcgccgtgctcagccttctcaacttccttgcctacctcgtcatcgccagctggtacaagtacaagaagacggccgatgattaccctggcgccaaaggggagcacggtacagagcactga

SEQ ID NO: 243 - protein, 580 aa, Zea mays
MGEVEDMYTQDGTVDMKGNPAVKKGTGNWRACPYILANECCERLAYYGMSTNLVNYMKTRLGQVNSVASNNVTNWQGTCYITPLIGAFFADAYMGRFWTIAIFMIIYIFGLALLTMASSVKGLVPTSCGDKDVCHPTDAQAAVVFVALYLIALGTGGIKPCVSSFGADQFDENDEREKKSKSSFFNWFYFSINIGALVASTVLVYVQTHVGWGWGFGIPAVVMAIAVGSFFVGTPLYRHQKPGGSPLTRIAQVLVACARKWNVAVPADKSRLHETVDGESVIEGSRKLEHSEQLACLDRAAVVTAEDGAEASPWRLCSVTQVEELKSVIRLLPIWASGIVFAAVYSQMSTMFVLQGNTLDQSMGPRFKIPSATLSMVDTISVIVWVPVYDRAIVPLVRSYTGRPRGFTQLQRMGIGLVVSIFSMVAAGVLDIVRLRAIARHGLYGENDIVPISIFWQIPQYFIIGCAEVFTFVGQLEFFYDQAPDAMRSMCSALSLTTVALGNYLSTVLVTIVTHITTRHGRIGWIPENLNRGHLDYFFWLLAVLSLLNFLAYLVIASWYKYKKTADDYPGAKGEHGTEH

SEQ ID NO: 244 - DNA, 2096 bp, Triticum aestivum
  CDS (85)..(1908)
acaagcgccaccacaccatctacctacctatgtgcgccggctgctaccttggtgcttgcgtagtgttcagcgagcaagagatcgatggacgcgcctcggcagcagcaggaggaggagcgcaaggagaagacgaaggcggtgaaggccgtctccgaggaggccgggtcgtcgtcctcggacaccggcgacgatggcgaggaggaggcgggcgccgtccacaaccaccgcggatggaaggccatgccctacgtcatagggaacgagacgttcgagaagctcgggacgatcggcacgctgtcaaacatgctggtgtacctgacaacggtgtaccacatgccgagcgtcaacgccgccaccctcctcaatgtattctccggcaccagcaacctcgccactgtcttcggcgcctacgtgagcgacacctacctcggccgctacaccaccatcgccgccgccaccatgtcctccttcataggcatgctcatcctcacgctcacggccgctatccacaccctccatcctcccgcgtgcaacgcgtccaaggggcaacattgtgagggtcccactggctcccagctcgccgccatcctagtgtccttcttcttcctagtcatcggtgctggaggcatccggccctgcaaccttgcctttggggccgaccagttcaacccacacactgctgatggtcgccgcggcatcgccagcttcttcaactggtactacttcaccttcacagtcgccatgatgctctcggcaaccgtcatcatctacctccagagcaacgttaattgggcgctagggctcgcagtgcctgccgcgctcatgggcctctcatgtgccgtcttcttcatgggcacacgcctctatgtccgtgtacgccccgagggcagccccttcacaagcttcgcccaagtcctcgtcgccgccgcccgcaagcgccacatccggcgagctcgcggcgatgccgagctgtttgacccaccgcaccagagtaagctcgtctccaagctggcatacaccgaccagtttgcgtgccttgataaggcggccgtgcggacccctgacgacgcgttgtgcatcgacgggaagacaccggctgacccgtggcggttgtgcacggtgcaacaggtggaggaggtcaagtgcctagcgcgcatcattccggtgtggtcgtcggggatcgtctacttcatcgtgctcacccagctgggcacctatgtcgtgctccaggctgcgcagatggaccgccgaatcagcaagtccagcagcttccagatcccgcaaggctccttcgtcgtcttccagatgctcgccctcacgatgtggatccctgtctacgaccgattcgtggtgccggcccttcgccgcttcacaaagcgcgagggcggcatcaccctgctccaacggatcggtgtcgggttggcgttgtctgtggcgacaatggtggtgtcagcggctgtggagcagcgacgacgaaagatcggctcgtcgatgtcgtgcttctggctggtgccgcagcaactgctggcgggcctgtcggaggcgttcggcgccatcgggcagattgagttctactaccggcagttcccggagaacatgcggagcgtggcgggggcgctctacttcctggggttcgcgatggcgagctacgcaagcgggctgatggtgatggtggtgcaccgggcgacgcgcgggcggggcggtcagcctgactggctggcgcaggacctggacgagggtagggtggacctgttctacctggtcaccgccgccatcgccactgtgaacctcgtctactttgtgatctgtgcacggtggtacaggttcaagaagtccgacgatgccggtgccggagatgttgagctcgacgacgacagcccgaagaaggctagtgctggtttagcttagttattattgcctccttttggggcttaatatactccgatgcatgcataggatggtagagtctaatggatatatgtgcatatgtacgtatgctcatcgatcgatcccggggaatgtatgtaatacagatttggaactaatcaaaaagccgaacaagggagattgaatagcagctaaaaaaaaaaaaaaaa

SEQ ID NO: 245 - protein, 607 aa, Triticum aestivum
MDAPRQQQEEERKEKTKAVKAVSEEAGSSSSDTGDDGEEEAGAVHNHRGWKAMPYVIGNETFEKLGTIGTLSNMLVYLTTVYHMPSVNAATLLNVFSGTSNLATVFGAYVSDTYLGRYTTIAAATMSSFIGMLILTLTAAIHTLHPPACNASKGQHCEGPTGSQLAAILVSFFFLVIGAGGIRPCNLAFGADQFNPHTADGRRGIASFFNWYYFTFTVAMMLSATVIIYLQSNVNWALGLAVPAALMGLSCAVFFMGTRLYVRVRPEGSPFTSFAQVLVAAARKRHIRRARGDAELFDPPHQSKLVSKLAYTDQFACLDKAAVRTPDDALCIDGKTPADPWRLCTVQQVEEVKCLARIIPVWSSGIVYFIVLTQLGTYVVLQAAQMDRRISKSSSFQIPQGSFVVFQMLALTMWIPVYDRFVVPALRRFTKREGGITLLQRIGVGLALSVATMVVSAAVEQRRRKIGSSMSCFWLVPQQLLAGLSEAFGAIGQIEFYYRQFPENMRSVAGALYFLGFAMASYASGLMVMVVHRATRGRGGQPDWLAQDLDEGRVDLFYLVTAAIATVNLVYFVICARWYRFKKSDDAGAGDVELDDDSPKKASAGLA

SEQ ID NO: 246 - DNA, 2098 bp, Triticum aestivum
  CDS (122)..(1888)
atctcccgggctcttcttgttgcgtctacaaagtatctgtgtctataactctatatatcttgctctctccgccgttgcagttggattgcaggagcactagctagctagccaggcagagagcatggaagtctcggccatggaggaagccgccgttcgtgtccctgtccctgcggcgaggaggaagggcggcctcagaaccataccgttcatcatctcgaacgagatcttcgagaaggtggcgacgtacgggctgcaagcgaacatggtcgtatacctcaccaagcggtacaacatgacgccggccgccagcgccatggtgctctacctttggtccgccctcaccaacttcctgcccatcggcggcggcgtgttgtcggacgttttcttcggccggttcccggtcatcgccgtgggatgcgtcgtcagcctctcggggatgtgcctgctattggtgactgcgatcctgccggtgtacaagaagactctggggtgcgacccggccaacccgagcgcgtgcacgatgctgccgtgccagctgccgctactgttcacgtcgttcatgctcatgtcgctcggggcgggcggcatccggccgtgcgcgctggcgttcggagcggaccagctggacaagcgggacaacagcaccaagaacgtgaggaggctgcagaccttcttcaactggtactacaccgtgctggggctctccctcgtcgttgccgtcctcgtcatcgtctacatacaggaccacatggggtgggtcgtcggcttctccgtgcccgtcgtgctcatgctcgccgctctcatgctcttcctggccggctcgcctttgtacctcaaggcggaggccgacaggagcgtgctggtgggcatcgtgcaggtgctcgtcgccagctacaagaaccggcgcgagctgttgccgccggacacggccgaagcgtcgtgctttcacaacaaagctggctccaggcccagagttcccaccaagaagatggtgtctatgaaccgggcgtgcgtgctcaggaacccgagcaaggagctcaacagcgacgggtcggcgtgtgacccgtggcggctgtgcacggtgcagcaggtggaggacgccaaggccgtcatccgcgtgctgccgatatggtccacggggatcataccgggcgtgatcgtcgcccaggtgatgttccccgtgctgcaagcaggtacgatggatcggcagatgggcaaggtggaggtccccgccgcatcctacagcgtcttcggcatcatcacgctcaccgtctgggtggccttgtacgaccgcgtgcttgtgcggcccctctcgcggctcaccggccacgcgcgcgggctcagcctgcgacagcgcatgggagccgggctggcggtcttcgccgtggccatggctgtggccgcgcgaaccgaggccctccgccgcggcgcggccatcgcggagggcttccaggaccaaaagcatgcggtggtacacatgtcggcgatgcggcttgtgccgcagcactgcctcatcgggctcgccgacgcgttgaacctgatcgggcagatcgagttctactactccgagttccccaagaccatgtccagcatcggggtgtcgctgctcgccctcggcgtgggcttcggcgccgtgctggggagcgccatcgtggggatcatgaacagcgccaccgggagggacgggcgcgacagctggttgtccagcaacctcaacaggggccgctacgactactactatctggttctcgcggcgctgtccgtggccaacttggtgtacttcatctggtgcagctgggcgtacggcgaggaagggcagatcagaattatggcgttggcggctgaggaggcggaggaggaagagaccaaacaagaacagcacaaatgataggcaaggcattcgccgggcagtgacgcagtgtgctgttgtgctcgtttgaccttgcgcgcgcctttctctcttgcgaattgctgaattgtgaattgtgatattgatgtgctacgttagtgtagaaacaacggatacacccggtctatatcatcattcatcattcggtcatgttacatgtttctagttgcatcaaaaaaaaaaaaaaaa

SEQ ID NO: 247 - protein, 588 aa, Triticum aestivum
MEVSAMEEAAVRVPVPAARRKGGLRTIPFIISNEIFEKVATYGLQANMVVYLTKRYNMTPAASAMVLYLWSALTNFLPIGGGVLSDVFFGRFPVIAVGCVVSLSGMCLLLVTAILPVYKKTLGCDPANPSACTMLPCQLPLLFTSFMLMSLGAGGIRPCALAFGADQLDKRDNSTKNVRRLQTFFNWYYTVLGLSLVVAVLVIVYIQDHMGWVVGFSVPVVLMLAALMLFLAGSPLYLKAEADRSVLVGIVQVLVASYKNRRELLPPDTAEASCFHNKAGSRPRVPTKKMVSMNRACVLRNPSKELNSDGSACDPWRLCTVQQVEDAKAVIRVLPIWSTGIIPGVIVAQVMFPVLQAGTMDRQMGKVEVPAASYSVFGIITLTVWVALYDRVLVRPLSRLTGHARGLSLRQRMGAGLAVFAVAMAVAARTEALRRGAAIAEGFQDQKHAVVHMSAMRLVPQHCLIGLADALNLIGQIEFYYSEFPKTMSSIGVSLLALGVGFGAVLGSAIVGIMNSATGRDGRDSWLSSNLNRGRYDYYYLVLAALSVANLVYFIWCSWAYGEEGQIRIMALAAEEAEEEETKQEQHK

SEQ ID NO: 248 - DNA, 1788 bp, Glycine max
  CDS (1)..(1788)
atggagaagaacaaagttgatgaaaatcctgaagaatttaactatgagatgaaatgggttcgtgattcttcattggatcacaaaggaagagttcctctccgagcttcaactggttcttggaaagcttctctcttcatcattgcaattgagtttagtgagagattgagctactttggaatagctactagcttggtcatttaccttacgaaagttcttcatcaagaccttaagacagcagttaaaaatgtgaactattggtctggtgtcaccaccttgataccattgttaggaggattcctagctgatgcttacttaggccgttacaccgctgtgatagcatcatgcattgtttatctcatgggtttggttctgctttctttgtcatggttcttaccaggtttcaaaccttgtgatcataccagtacatgcaccgaacctaggaggattcatgaggtgggtttcttcctaggcatctatttaatatcagtaggaactggaggccataaaccttccttggagagctctggtgctgatcaatttgatgataataatgccaaagaaagaagtcagaaaatgtcctttttcaactggtggaacagtggttcgtgtagtggaatcattctacgagtgactgtgattgtgtatgttcaagaccatgtcaattggggggttgctgatatcgtcctcacaggggtcatggctgtctcattgctcatattcttgattggaaggtcttcttatcgttacaggacaccaattgggagccccttgactcctatgttgcaagttattgttgctgctatttccaaaagaaagcttccatatccttccaatccaactcaattgtatgaagtttccaagtctgagggcaacagtgaaagatttctggctcacaccaagaaactcaaatttcttgacaaggcagcaatccttgaaaatgaagggaacatagcagagaaacagagtccatggagacttgcaacagtaaccaaggttgaagaactgaagcttatcatcaacatgatccccatttgggtgttcacattaccatttggaatctgtgcttcccaaacctccactttcttcatcaaacaaggtgccatcatgaacagaaatataggcaataatggatttgtggttcccccagcttcaattttcactcttgcagccgttgggatgatactttcagtgaccatctatgacaagctccttgtgccagtgctaagaaaactaacaggaaatgacagaggaatcagcatcctccaaaggattggtattggaatggtcttctcagtcatcacaatgatagtggcagctttggtggaaaaaaagaggcttgaggcagttgaaatgaatggcccattaaagggttctttgtccatgagtgccctttggttggccccacaatttatgatcattggatttggtgatgggtttgctcttgtgggcttgcaagagtatttctatgaccaagtgcctgactcaatgagaagccttggaatagcactttaccttagtgtcattggggctgcaagttttcttagtagtttattaataacaattgtggatcatgtcactggtaagattgggaagagttggattggtaaggatttgaatagtagccgcttggacaaattttactggcttcttgcagccatcaccacattgaacttgttcatgtttgtgatctttgctcgcaagtataactacaagaatgtgcaaaaggtggcagcggctgattgctacgaaggcaaaagtgaggatgatggatcagagacttgggtttga

SEQ ID NO: 249 - protein, 595 aa, Glycine max
MEKNKVDENPEEFNYEMKWVRDSSLDHKGRVPLRASTGSWKASLFIIAIEFSERLSYFGIATSLVIYLTKVLHQDLKTAVKNVNYWSGVTTLIPLLGGFLADAYLGRYTAVIASCIVYLMGLVLLSLSWFLPGFKPCDHTSTCTEPRRIHEVGFFLGIYLISVGTGGHKPSLESSGADQFDDNNAKERSQKMSFFNWWNSGSCSGIILRVTVIVYVQDHVNWGVADIVLTGVMAVSLLIFLIGRSSYRYRTPIGSPLTPMLQVIVAAISKRKLPYPSNPTQLYEVSKSEGNSERFLAHTKKLKFLDKAAILENEGNIAEKQSPWRLATVTKVEELKLIINMIPIWVFTLPFGICASQTSTFFIKQGAIMNRNIGNNGFVVPPASIFTLAAVGMILSVTIYDKLLVPVLRKLTGNDRGISILQRIGIGMVFSVITMIVAALVEKKRLEAVEMNGPLKGSLSMSALWLAPQFMIIGFGDGFALVGLQEYFYDQVPDSMRSLGIALYLSVIGAASFLSSLLITIVDHVTGKIGKSWIGKDLNSSRLDKFYWLLAAITTLNLFMFVIFARKYNYKNVQKVAAADCYEGKSEDDGSETWV

SEQ ID NO: 250 - DNA, 1851 bp, Glycine max
  CDS (1)..(1851)
atggacaaggaagtggagcttggttcccttgaaggtgaaatggccacccagcacatttcacaaccacagaagcgcaagggtggtcttgttaccatgcctttcatcattgcaaatgaggcacttgcgagggtggcaagtttgggccttttgcccaacatgatactgtatttgatggggacctacaggcttcaccttgcccaagcaacccagatacttctctcgtcccatgctaccagcaatttcacacctgtggtgggtgctttcattgctgattcttatctgggtcgattcctcgctgttgggttgggttcggccatcacttttctgggaatgacactgctgtggttaacagctatgatcccacaggcacggcctcccacttgcagtagcaataaagctggaggctgtaaatcggcaacaggagggcaaatggcaatcttaatctctgcccttgctctcatgtctgttggaaatggtggtctttcatgctccttagcatttggtgcagaccaggtgaacagaaaagataaccccaacaacagaagggtcttggaaatattcttcagctggtattatgcttctgctgctatttctgtcataattgctctcacaggaatagtttatatccaagatcatcttggatggaaagtgggttatggagttccagcagcactcatgcttttatctactgtctccttcctccttgcctctccactttatgtaaagaataaagtagaatccagcttgttcacaggatttgtacaagtgattgttgttgcctacaagaacagaaaacttccattaccaccaaacaactcccctgaacattaccatcataagaaggagtcagaccttgtcgttccaaccgataaactaagtttcctgaatagagcctgtgttatcaaagatcgggaacaagaaatagcctcggatggttcagcatcaaatccatggaaactctgcacagtagatcaagtagaggaactaaaagccattattaaagtgattcccttgtggtctacagggatcatgatgtcagttaacattggaggctcatttggattgctgcaagctaagtccctggacagacacatcacctcacacttccaagtgccacctggctcttttagtgtagtcatggtacttacaatatttttatggatagctctctatgaccgagccattcttcctttagcatcaaagataagaggcaaaccggttaggatcagtgcaaagagaagaatgggacttggcttgtttttctcttttatccacttggtaacttcggctattgtcgaatccgtaaggcgaaggagagcaatcaaggagggatatcttaacaatgccaatggtgtgttgcatatgtctgcaatgtggcttttcccacaactttgcttgggtggaatagctgaagcattcaatgcaataggccaaaatgagttctattacacagagtttcctaggaccatgtccagtgttgctgcttccctttctggactgggaatggctgcaggaaacttggtgtctagttttgtcttcagcgttgtacaaaatgctacttcaagaggggggaaagaaggttgggttttggataacattaacaagggtcgttatgacaagtactactgggttatttctggactcagtgctcttaatatagtgtattatctaatatgcagttgggcttatggacctaccgttgagcaagtacaagtacgtaagttaggtgaagaaaatggctcaagggaattagaaccttcaactgaatttaggaatgggagtcaggttgacaaagaattccagattagtaaagaaaatggctcaaaggaggaagaagagttaactaggtga

SEQ ID NO: 251 - protein, 616 aa, Glycine max
MDKEVELGSLEGEMATQHISQPQKRKGGLVTMPFIIANEALARVASLGLLPNMILYLMGTYRLHLAQATQILLSSHATSNFTPVVGAFIADSYLGRFLAVGLGSAITFLGMTLLWLTAMIPQARPPTCSSNKAGGCKSATGGQMAILISALALMSVGNGGLSCSLAFGADQVNRKDNPNNRRVLEIFFSWYYASAAISVIIALTGIVYIQDHLGWKVGYGVPAALMLLSTVSFLLASPLYVKNKVESSLFTGFVQVIVVAYKNRKLPLPPNNSPEHYHHKKESDLVVPTDKLSFLNRACVIKDREQEIASDGSASNPWKLCTVDQVEELKAIIKVIPLWSTGIMMSVNIGGSFGLLQAKSLDRHITSHFQVPPGSFSVVMVLTIFLWIALYDRAILPLASKIRGKPVRISAKRRMGLGLFFSFIHLVTSAIVESVRRRRAIKEGYLNNANGVLHMSAMWLFPQLCLGGIAEAFNAIGQNEFYYTEFPRTMSSVAASLSGLGMAAGNLVSSFVFSVVQNATSRGGKEGWVLDNINKGRYDKYYWVISGLSALNIVYYLICSWAYGPTVEQVQVRKLGEENGSRELEPSTEFRNGSQVDKEFQISKENGSKEEEELTR

SEQ ID NO: 252 - DNA, 1851 bp, Glycine max
  CDS (1)..(1851)
atggacaaggaagtggagcttggttcccttgaaggtgaaatggccacccagcacatttcacaaccacagaagcgcaagggtggtcttgttaccatgcctttcatcattgcaaatgaggcacttgcgagggtggcaagtttgggccttttgcccaacatgatactgtatttgatggggacctacaggcttcaccttgcccaagcaacccagatacttctctggtcccatgctaccagcaatttcacacctgtggtgggtgctttcattgctgattcttatctgggtcgattcctcgctgttgggttgggttcggccatcacttttctgggaatgacactgctgtggttaacagctatgatcccacaggcacggcctcccacttgcagtagcaataaagctggaggctgtaaatcggcaacaggagggcaaatggcaatcttaatctctgcccttgctctcatgtctgttggaaatggtggtctttcatgctccttagcatttggtgcagaccaggtgaacagaaaagataaccccaacaacagaagggtcttggaaatattcttcagctggtattatgcttctgctgctatttctgtcataattgctctcacaggaatagtttatatccaagatcattttggatggaaagtgggttatggagttccagcagcactcatgcttttatctactgtctccttcctccttgcctctccactttatgtaaagaataaagtagaatccagcttgttcacaggatttgtacaagtgattgttgttgcctacaagaacagaaaacttccattaccaccaaacaactcccctgaacattaccatcataagaaggagtcagaccttgtcgttccaaccgataaactaagtttcctgaatagagcctgtgttatcaaagatcgggaacaagaaatagcctcggatggttcagcatcaaatccatggaaactctgcacagtagatcaagtagaggaactaaaagccattattaaagtgattcccttgtggtctacagggatcatgatgtcagttaacattggaggctcatttggattgctgcaagctaagtccctggacagacacatcacctcacacttccaagtgccacctggctcttttagtgtagtcatggtacttacaatatttttatggatagctctctatgaccgagccattcttcctttagcatcaaagataagaggcaaaccggttaggatcagtgcaaagagaagaatgggacttggcttgtttttctcttttatccacttggtaacttcggctattgtcgaatccgtaaggcgaaggagagcaatcaaggagggatatcttaacaatgccaatggtgtgttgcatatgtctgcaatgtggcttttcccacaactttgcttgggtggaatagctgaagcattcaatgcaataggccaaaatgagttctattacacagagtttcctaggaccatgtccagtgttgctgcttccctttctggactgggaatggctgcaggaaacttggtgtctagttttgtcttcagcgttgtacaaaatgctacttcaagaggggggaaagaaggttgggttttggataacattaacaagggtcgttatgacaagtactactgggttatttctggactcagtgctcttaatatagtgtattatctaatatgcagttgggcttatggacctaccgttgagcaagtacaagtacgtaagttaggtgaagaaaatggctcaagggaattagaaccttcaactgaatttaggaatgggagtcaggttgacaaagaattccagattagtaaagaaaatggctcaaaggaggaagaagagttaactaggtga

SEQ ID NO: 253 - protein, 616 aa, Glycine max
MDKEVELGSLEGEMATQHISQPQKRKGGLVTMPFIIANEALARVASLGLLPNMILYLMGTYRLHLAQATQILLWSHATSNFTPVVGAFIADSYLGRFLAVGLGSAITFLGMTLLWLTAMIPQARPPTCSSNKAGGCKSATGGQMAILISALALMSVGNGGLSCSLAFGADQVNRKDNPNNRRVLEIFFSWYYASAAISVIIALTGIVYIQDHFGWKVGYGVPAALMLLSTVSFLLASPLYVKNKVESSLFTGFVQVIVVAYKNRKLPLPPNNSPEHYHHKKESDLVVPTDKLSFLNRACVIKDREQEIASDGSASNPWKLCTVDQVEELKAIIKVIPLWSTGIMMSVNIGGSFGLLQAKSLDRHITSHFQVPPGSFSVVMVLTIFLWIALYDRAILPLASKIRGKPVRISAKRRMGLGLFFSFIHLVTSAIVESVRRRRAIKEGYLNNANGVLHMSAMWLFPQLCLGGIAEAFNAIGQNEFYYTEFPRTMSSVAASLSGLGMAAGNLVSSFVFSVVQNATSRGGKEGWVLDNINKGRYDKYYWVISGLSALNIVYYLICSWAYGPTVEQVQVRKLGEENGSRELEPSTEFRNGSQVDKEFQISKENGSKEEEELTR

SEQ ID NO: 254 - DNA, 1764 bp, Arabidopsis thaliana
  CDS (1)..(1764)
atggaggttgagaagacagagaagaacattgcagaggatgatgagtctaagatcatctacagaggatggaaagtcatgcccttcatcattggaaatgagacatttgaaaaattggggattgttggaagttcatcgaatctggttatatacttaacgacggttttcaacatgaagagcatcacggctgcgaaagtcgtcaacatctacggtggcacaagcaactttggcaccatcgtcgctgctttcctctgtgactcctactttggccgctacaagaccctatctttcgccatgatcgcttgctttctcggttcggtggcaatggatctaacggctgtgattcatcccctgcatccagctcaatgcgctaaggaaataggaagcgtgtgcaatgggccatccatcggacaaatcatgtttctcgccggagcaatggttttgctggtgatcggagccggtgggattaggccatgcaatcttccatttggtgctgatcagttcgatccgaagacaaaagaagggaaacgagggattgagagtttcttcaattggtatttcttcaccttcacgtttgctcagatggtgtcgttaaccctcatcgtctatgttcagtcaaacgtgagctggagcattggtttagccatcccagctattctaatgctacttggttgcatcatattcttcgctggttctaagctctatgtcaaggttaaagctagtggcagtcccattcacagcataactcgtgtcattgttgtcgcgatcaagaagaggcggttaaagcccgttgggcctaacgagctttacaactacatcgccagtgatttcaagaactcgaaattgggccatacagagcagttcaggtttcttgacaaatcggcaatccaaacacaagacgacaagctgaacaaagatgggtcgccggtggatgcatggaaactctgcagtatgcaacaagtggaggaagttaaatgcgtgatccgggtgcttccggtttggctctcggccgccttattctacctagcttacattcaacaaacaacctacacaatctttcagtctcttcaatccgatagacgccttggtccaggaagtttccagatcccggccggttcttataccgtcttcctaatgcttggaatgacgatattcatacctatctatgaccgcgtccttgtacctttccttagaaagtatacaggcagagacggcggtatcacacaactgcagagagttggagcaggactgtttctatgcatcacaagtatgatggtgtctgcaattgtagaacaatacagaagaaaggtagctctcacaaaaccgacgctagggttggccccaagaaaaggcgcaatctcttcgatgtccggtatgtggttgattcctcagctagtgctaatgggtatcgcggacgccctcgctggagttggacaaatggagttttactacaaacagtttccagagaacatgcgaagttttgctggttctctgtattattgtggaatcggattggcgagttacctcagcacctttttgttatcggcggtacacgataccacagagggattttcaggaggaagttggcttccggaagatttaaacaagggaagattggagtatttctacttcttggttgctggtatgatgactctaaacttggcctatttcttgttggtctcacattggtaccgttacaaagatgttgtggccaaggacaaggacatggacaagacttctgctgagtttgataaggtgtcagtgtaa

SEQ ID NO: 255 - protein, 587 aa, Arabidopsis thaliana
MEVEKTEKNIAEDDESKIIYRGWKVMPFIIGNETFEKLGIVGSSSNLVIYLTTVFNMKSITAAKVVNIYGGTSNFGTIVAAFLCDSYFGRYKTLSFAMIACFLGSVAMDLTAVIHPLHPAQCAKEIGSVCNGPSIGQIMFLAGAMVLLVIGAGGIRPCNLPFGADQFDPKTKEGKRGIESFFNWYFFTFTFAQMVSLTLIVYVQSNVSWSIGLAIPAILMLLGCIIFFAGSKLYVKVKASGSPIHSITRVIVVAIKKRRLKPVGPNELYNYIASDFKNSKLGHTEQFRFLDKSAIQTQDDKLNKDGSPVDAWKLCSMQQVEEVKCVIRVLPVWLSAALFYLAYIQQTTYTIFQSLQSDRRLGPGSFQIPAGSYTVFLMLGMTIFIPIYDRVLVPFLRKYTGRDGGITQLQRVGAGLFLCITSMMVSAIVEQYRRKVALTKPTLGLAPRKGAISSMSGMWLIPQLVLMGIADALAGVGQMEFYYKQFPENMRSFAGSLYYCGIGLASYLSTFLLSAVHDTTEGFSGGSWLPEDLNKGRLEYFYFLVAGMMTLNLAYFLLVSHWYRYKDVVAKDKDMDKTSAEFDKVSV

SEQ ID NO: 256 - DNA, 1791 bp, Arabidopsis thaliana
  CDS (1)..(1791)
atggaggagcaaagcaagaacaagatcagtgaagaagaaaaacaactccatgggagaccaaatcgaccaaagggaggattaattaccatgcccttcatcttcgcgaacgagatatgtgaaaaattagcggtggtggggtttcacgcaaacatgataagttacttaacaacacagcttcaccttcccttaaccaaagcagccaacactctcacaaacttcgccgggacatcgagtcttactcctctccttggtgcctttatcgccgactctttcgccggccgattttggaccatcacttttgcttccatcatctaccaaatcgggatgacgttgcttacgatatcggcaataataccaacgctaaggccaccaccatgtaaaggagaagaggtttgtgtagtagctgacacagcacaattgagtatactttacgtagctcttcttcttggagctctcgggtcgggtgggatccgaccatgtgttgttgcttttggtgctgatcagttcgacgagtcggatcctaatcaaaccaccaaaacttggaactacttcaactggtactacttttgcatgggtgcagcagttttactggcggtgacggttcttgtgtggatccaagataacgttgggtggggtctaggtttaggcattccgacagtagctatgttcttatccgttattgcttttgtcggcggttttcaactttaccgtcacttggttcccgcgggtagtccatttacccgcttgatccaagtgggagtcgcggcatttcgcaaaaggaaactgaggatggtttctgatccctctcttctctattttaacgacgagattgatgcacctatctccttaggtggtaaactcacccacaccaaacacatgagtttcttggacaaggcggcaatagtaacggaggaagacaatttaaaaccgggtcaaatcccaaaccattggaggctaagcacagtccatcgagtcgaagaactcaaatccgtcatccgaatgggtccaatcggagcatccgggattctcctaatcacagcctatgctcaacaaggaaccttctcattacaacaagccaaaaccatgaaccgtcacctaacaaactccttccaaatcccagccggttcaatgtccgtcttcacaaccgtcgctatgcttaccacaatcatcttctacgaccgcgtcttcgtcaaagtcgctcgcaaattcaccggtctcgaaagaggcatcacgttcctccaccgtatgggaatcggattcgtaatctcgataatcgccacgttagttgccggattcgtcgaagtaaagcgaaagagcgtcgcgattgagcacggtctcctcgataaacctcacacgattgttccaatctcgtttctttggttgattcctcaatatggtctccatggagtcgctgaagctttcatgtccatcggacatttagagttcttctacgatcaggcaccggagagtatgaggagcacggcaacggcgcttttttggatggcgatttcgatcggaaactatgtgagcactttgctggtgactttggttcataaattcagtgctaaaccggatgggagcaattggttaccggataacaatttgaaccgagggaggcttgagtatttttactggttgattactgtgttacaagctgttaatcttgtgtattatctatggtgcgccaagatttatacgtataaaccggttcaggttcatcatagcaaggaagatagtagtccggttaaggaggaattgcagttgtcaaataggagtttagttgatgaatga

SEQ ID NO: 257 - protein, 596 aa, Arabidopsis thaliana
MEEQSKNKISEEEKQLHGRPNRPKGGLITMPFIFANEICEKLAVVGFHANMISYLTTQLHLPLTKAANTLTNFAGTSSLTPLLGAFIADSFAGRFWTITFASIIYQIGMTLLTISAIIPTLRPPPCKGEEVCVVADTAQLSILYVALLLGALGSGGIRPCVVAFGADQFDESDPNQTTKTWNYFNWYYFCMGAAVLLAVTVLVWIQDNVGWGLGLGIPTVAMFLSVIAFVGGFQLYRHLVPAGSPFTRLIQVGVAAFRKRKLRMVSDPSLLYFNDEIDAPISLGGKLTHTKHMSFLDKAAIVTEEDNLKPGQIPNHWRLSTVHRVEELKSVIRMGPIGASGILLITAYAQQGTFSLQQAKTMNRHLTNSFQIPAGSMSVFTTVAMLTTIIFYDRVFVKVARKFTGLERGITFLHRMGIGFVISIIATLVAGFVEVKRKSVAIEHGLLDKPHTIVPISFLWLIPQYGLHGVAEAFMSIGHLEFFYDQAPESMRSTATALFWMAISIGNYVSTLLVTLVHKFSAKPDGSNWLPDNNLNRGRLEYFYWLITVLQAVNLVYYLWCAKIYTYKPVQVHHSKEDSSPVKEELQLSNRSLVDE

SEQ ID NO: 258 - DNA, 1668 bp, Arabidopsis thaliana
  CDS (1)..(1668)
atggacaatgagaaagggacaagttcctcggatttaacgacgagacaaaggaagcctcttggttggaaagcgatgccttatatcatagggaatgaaacattggagaggcttgccacattcggtttgatggcgaatttcatggtgtatatggtaagagagtatcatatggaccaagttcaagctgtcactcttatcaacacttggtctgctctcaccaactttgctcctatcatcggagctttcatctccgactcctacaccggaaaatttaataccattgtcttcggttccatcgctgagttgttgggcatgttggtgttgactttcacgtctctggtccctaatctacgaccaccaccttgcactgccgaccaaatcactggacaatgtattccctatagctattcgcagttatacgttttactctcaggacttttcttgttatcagttggaacaggtggaatccggtcatgcagtgttcctttcagtctcgatcagttcgatgattcgactgaagaaggaagagaaggaagtagaagcttctttagctggtactataccactcatacaatcgtccagttagtttcaatgacactagtgttgtacgtacagaacaacatcagttggggcattggattcgcaatcccgaccgttctcaatttttttgcgcttcttctgctttttgtgggtactcggtattatgtctttgtcaaacccgaaggaagtgtcttctctggagttttcaaggttcttgtggctgcttataagaaacgcaaggcacggtttacttctggaattgactaccatcaacccttactagagacagatttacaatcaaataaactcgtactcactgatcaattcagattcttgaacaaagctgtgatagtgatgaacaatgatgaagctggaaatgaggagtggagaacctgcacagtgagacagatagaggacatcaagtcaataatcagtattattccaatatttgcttcgagcattattggatttttggctatgaaccaacaacagacgtttacagtctcacaagcactaaaaatggacctccaatttccaggcacttcttacctaatccctcctgcttctataaccgtcatatcattattaaacataggtatatggcttcccttctatgaaaccgttttggtccgacacatcgaaaacattacaaaacaaaacggaggtatctcgttactacaaaaagtcggcattgggaatattttctccatctcgacgatgctcatatccggtattgtggagcgaaagagaagagatttatcgcttaatggagtaaaaatgtcggttttctggctaaccccgcaacaagtactaatgggattttatcaagtcttcacgattgttggtctcaccgagttcttcaacaaacaagttccaatcaacatgagaagcattgggaactcgttgctttacttaggtttgtctctagccagttatctaagcagtgccatggtgagcattgttcatagtgtgactgctcgtggaggacagagttggctaacggatgatattgacaaaagcaagttggattgtttctattactttattgccgctttaagcactcttaatttcatcttcttcttctggtgtgctcgaaggtatcgttacagaaactatagtaatgaacaataa

SEQ ID NO: 259 - protein, 555 aa, Arabidopsis thaliana
MDNEKGTSSSDLTTRQRKPLGWKAMPYIIGNETLERLATFGLMANFMVYMVREYHMDQVQAVTLINTWSALTNFAPIIGAFISDSYTGKFNTIVFGSIAELLGMLVLTFTSLVPNLRPPPCTADQITGQCIPYSYSQLYVLLSGLFLLSVGTGGIRSCSVPFSLDQFDDSTEEGREGSRSFFSWYYTTHTIVQLVSMTLVLYVQNNISWGIGFAIPTVLNFFALLLLFVGTRYYVFVKPEGSVFSGVFKVLVAAYKKRKARFTSGIDYHQPLLETDLQSNKLVLTDQFRFLNKAVIVMNNDEAGNEEWRTCTVRQIEDIKSIISIIPIFASSIIGFLAMNQQQTFTVSQALKMDLQFPGTSYLIPPASITVISLLNIGIWLPFYETVLVRHIENITKQNGGISLLQKVGIGNIFSISTMLISGIVERKRRDLSLNGVKMSVFWLTPQQVLMGFYQVFTIVGLTEFFNKQVPINMRSIGNSLLYLGLSLASYLSSAMVSIVHSVTARGGQSWLTDDIDKSKLDCFYYFIAALSTLNFIFFFWCARRYRYRNYSNEQ

SEQ ID NO: 260 - DNA, 1713 bp, Arabidopsis thaliana
  CDS (1)..(1713)
atggaagaaaaagatgtgtatacgcaagatggaactgttgatattcacaaaaatcctgcaaacaaggagaaaaccggaaattggaaagcttgccgcttcattctcggaaatgagtgctgtgaaagattggcctactatggcatgggcactaaccttgtgaattatcttgagagccgtctgaatcaaggcaatgctacggctgcaaataacgtcacgaattggtctggaacatgttatataactcctttgattggagcctttatagctgatgcttaccttggacgatattggactattgcaacttttgttttcatctatgtctccggtatgactcttttgacattatcagcttcagttcctggacttaaaccaggtaactgcaatgctgatacttgtcatccaaattctagtcagactgctgttttctttgtcgcgctttatatgattgctcttggaactggcggtataaagccgtgtgtttcgtcctttggagctgatcagtttgatgagaatgatgagaatgagaagatcaagaaaagttctttcttcaactggttttacttctccattaatgttggagctctcattgctgcaactgttctcgtctggatacaaatgaatgttggttggggatggggtttcggtgttccaacagtcgcgatggttatcgcggtttgctttttcttcttcggaagccgtttttacagacttcagagacctggagggagtccacttactaggatctttcaggttatagtagcggcttttcggaagataagtgttaaggttccagaggacaagtctctgctctttgaaactgcagatgatgagagtaacatcaaaggtagccggaaacttgtgcacacagataacttaaagttttttgacaaggcagcggttgagagtcaatctgatagcatcaaagacggggaagtcaatccatggagactatgttctgttactcaagttgaagaacttaagtcaataatcacacttcttccagtttgggccacaggaatagtcttcgccacagtgtacagccaaatgagcacaatgtttgtgttacaaggaaacacaatggaccaacacatgggaaaaaactttgaaatcccatcagcttcactctcacttttcgacactgtcagtgtactcttctggactcctgtctatgaccagttcattatcccgctggcaagaaagttcacacgcaatgaacgaggcttcactcagcttcaacgtatgggtataggtcttgtggtctccatctttgccatgatcactgcaggagtcttggaggttgtcaggcttgattatgtcaaaactcacaatgcatatgaccaaaaacagatccatatgtcgatattctggcagataccgcagtatttacttatcggttgtgcagaagttttcacctttataggtcagcttgagtttttctatgatcaggctcctgatgccatgagaagtctctgctctgctttgtcgttgaccacggttgcgttggggaactatttgagcacagttcttgtgacggttgtgatgaagataacgaagaagaacggtaaaccgggttggataccggataacttgaaccgaggccatcttgattactttttctacttgttggcaactctcagtttcctcaacttcttagtgtacctctggatttcaaaacgctacaaatacaagaaagctgttggtcgagcacattga

SEQ ID NO: 261 - protein, 570 aa, Arabidopsis thaliana
MEEKDVYTQDGTVDIHKNPANKEKTGNWKACRFILGNECCERLAYYGMGTNLVNYLESRLNQGNATAANNVTNWSGTCYITPLIGAFIADAYLGRYWTIATFVFIYVSGMTLLTLSASVPGLKPGNCNADTCHPNSSQTAVFFVALYMIALGTGGIKPCVSSFGADQFDENDENEKIKKSSFFNWFYFSINVGALIAATVLVWIQMNVGWGWGFGVPTVAMVIAVCFFFFGSRFYRLQRPGGSPLTRIFQVIVAAFRKISVKVPEDKSLLFETADDESNIKGSRKLVHTDNLKFFDKAAVESQSDSIKDGEVNPWRLCSVTQVEELKSIITLLPVWATGIVFATVYSQMSTMFVLQGNTMDQHMGKNFEIPSASLSLFDTVSVLFWTPVYDQFIIPLARKFTRNERGFTQLQRMGIGLVVSIFAMITAGVLEVVRLDYVKTHNAYDQKQIHMSIFWQIPQYLLIGCAEVFTFIGQLEFFYDQAPDAMRSLCSALSLTTVALGNYLSTVLVTVVMKITKKNGKPGWIPDNLNRGHLDYFFYLLATLSFLNFLVYLWISKRYKYKKAVGRAH

SEQ ID NO: 262 - DNA, 1686 bp, Arabidopsis thaliana
  CDS (1)..(1686)
atggacgtcgaatcttcatcaccatcgtcacatgctcttattaagaaggagaaaggaggatggagagctatcaagtacattattgcaaacgagtcttttgagaagctggcctcaatgagcttaattgggaatctatcggtgtatctcatgacaaaatataatcttggtggtgtcttcttggtgaacgtcatcaacatatggtttggttcttgcaacattcttacactcgctggtgcttttgtctctgatgcttaccttggaagattttggactcttctactcggttccatcgcctcctttataggaatgggaatatttgctctaaccgctgctctcccgagtttaagacctgatgcttgcattgatccatcgaattgttcaaaccagccggcgaaatggcagctcggggttctattctccggtctaggtttactagccattggagcaggaggagtaagaccatgcaatatcgcatttggagctgatcaattcgatacaagcactaaaaagggcaaagctcaccttgaaacattctttaactggtggtacttctctttcaccgtggctctagttattgcactgacaggtgttgtctatatacagactaacatcagttgggtcattggtttcgtgatccccacggcttgtcttgcactctccatcacaaccttcgtcattggtcagcatacttacatatgtgcaaaagctgagggcagtgtgttcgcagacatagttaaggttgttactgcggcttgcaagaaacgtaaggtgaaacctggatcagatataacgttctatataggcccttctaatgatggatcacccaccactttggtccgagacaaacacagattaaggttctttgacaaagcatctatcgtaacgaatccgaacgagttaaacgaagacggtaacgcgaagtacaaatggagattatgtagtgtgcagcaggtgaaaaacctcaagtgtgtgacagcaattttaccagtttgggtcacgggaatcgcgtgtttcatactgactgaccaacaaaacatttacgggatccttcaagcaatgcagatggataaaacgtttggaccacataacttccaagtcccggcaggatggatgaatctcgtctccatgatcactctagcgatttggatctcactttacgagtgtgttatcataccaatagtgaaacaaatcacgggtcggaaaaaacggttaacgttaaaacatagaatcgagataggtatagtaatgggaatcatttgtatgattgtcgcgggtttccaagagaagaagcgaagagcatccgctctaaagaatggctcattcgtgtcgccggtttctattgtaatgctccttcctcagttcgctcttgccggtttaaccgaagcgttttccgcggtggctctgatggagtttctgacggttaggatgcctgagcatatgagagcggttgctggagcgatcttcttcttgagctcgtcgattgcgagttacatatgcacacttcttataaatgtgattgatgccgtgacgcgcaaggaagggaaatcttggttaggagacaaagacttgaacaagaacaggcttgagaattactttttcataatagccggcattcaagtcgcgaatcttctctattttaggttatttgcttcaaggtatgccactgaaaacaaaaaaggacactaa

SEQ ID NO: 263 - protein, 561 aa, Arabidopsis thaliana
MDVESSSPSSHALIKKEKGGWRAIKYIIANESFEKLASMSLIGNLSVYLMTKYNLGGVFLVNVINIWFGSCNILTLAGAFVSDAYLGRFWTLLLGSIASFIGMGIFALTAALPSLRPDACIDPSNCSNQPAKWQLGVLFSGLGLLAIGAGGVRPCNIAFGADQFDTSTKKGKAHLETFFNWWYFSFTVALVIALTGVVYIQTNISWVIGFVIPTACLALSITTFVIGQHTYICAKAEGSVFADIVKVVTAACKKRKVKPGSDITFYIGPSNDGSPTTLVRDKHRLRFFDKASIVTNPNELNEDGNAKYKWRLCSVQQVKNLKCVTAILPVWVTGIACFILTDQQNIYGILQAMQMDKTFGPHNFQVPAGWMNLVSMITLAIWISLYECVIIPIVKQITGRKKRLTLKHRIEIGIVMGIICMIVAGFQEKKRRASALKNGSFVSPVSIVMLLPQFALAGLTEAFSAVALMEFLTVRMPEHMRAVAGAIFFLSSSIASYICTLLINVIDAVTRKEGKSWLGDKDLNKNRLENYFFIIAGIQVANLLYFRLFASRYATENKKGH

SEQ ID NO: 264 - DNA, 1851 bp, Arabidopsis thaliana
  CDS (1)..(1851)
atggagagaaagcctcttgaacttgagtcgacggataaccaccagaatccttcctccgccgtatacggtggctctgttacggcggttgactctgttgaagaagatgttcagaatcagaagaaagtcgtttatagaggctggaaagtcatgccctttattattggaaatgagacatttgagaagcttgggatcattggaacactatcaaaccttctggtttatttaactgcagtcttcaacctgaagagtattacagctgcaaccatcattaacgcctttagtggcacaattaatttcggaactttcgttgctgcttttctctgtgacacttacttcggtcgatacaagactctaagtgtcgcggtcatcgcatgttttcttggatcatttgtgatactattgactgcagcagtgccacaactgcatccagctgcatgtggaacagcggcggatagcatatgtaacgggccaagtggaggccagatagcgtttctactgatgggtctcgggttccttgtagtgggagcgggcggtattagaccgtgtaacttagcttttggggctgatcagtttaacccgaaaagcgaatcagggaaaagagggattgacagtttctttaattggtatttctttaccttcactttcgcgcagatcctgtcgctgactctagtcgtctacgttcagtctaatgtcagttggacgatcggtctaaccatccctgccgttctaatgtttttggcctgcttgattttctttgcgggcgataagttgtatgtgaagatcaaagcctcgggtagtccattggccggtatagctcaagttatagcggttgcgatcaagaaacgcggattaaagcccgcgaaacagccttggcttaacctttacaattactacccaccaaaatacgcaaactccaagctcaaatacacagaccaattcagatttcttgataaagccgctatcttgactcctgaagacaagttgcagccagatggtaagcctgctgatccttggaagctctgtacaatgcaacaagttgaagaagtgaagtgcatcgtgagagtgcttcctatatggtttgcatcatcaatttactacttaaccataactcaacaaatgacttatcccgtcttccaagcccttcagagcgaccgtcgcttaggctcaggaggttttgtgattcccgcagccacctacgtggttttcttgatgacgggaatgacagttttcatcgtagtctacgaccgtgtacttgtgccaaccatgagaagaattactggtctagacaccgggataacgctcttgcagagaattggaactggcattttcttcgctaccgcgagtttagtagtcgcgggatttgtcgaggaacgaaggagaacattcgctctgactaaaccaacactcggtatggcgccaagaaagggagaaatctcgtcgatgtcagctatgtggctgattccgcagctctcactggcgggtgtagcagaggcatttgcagccattggacaaatggagttttactacaagcagtttcccgagaacatgaggagtttcgctggatccatcttttacgttggaggaggagtttcgagttaccttggtagcttcttgattgcaacagttcacaggacaacacagaactcgtcagggggtaactggttagctgaggatttgaacaaaggaagattggatctcttctatttcatgatcgctggaatcctggcagttaattttgcttatttcttggtgatgtcaagatggtataggtacaaaggaagtgatgacgaagtgacaacatatgaaaccaatgaaaatatcatcaaacagcaagacaagaacgttgcctga

SEQ ID NO: 265 - protein, 616 aa, Arabidopsis thaliana
MERKPLELESTDNHQNPSSAVYGGSVTAVDSVEEDVQNQKKVVYRGWKVMPFIIGNETFEKLGIIGTLSNLLVYLTAVFNLKSITAATIINAFSGTINFGTFVAAFLCDTYFGRYKTLSVAVIACFLGSFVILLTAAVPQLHPAACGTAADSICNGPSGGQIAFLLMGLGFLVVGAGGIRPCNLAFGADQFNPKSESGKRGIDSFFNWYFFTFTFAQILSLTLVVYVQSNVSWTIGLTIPAVLMFLACLIFFAGDKLYVKIKASGSPLAGIAQVIAVAIKKRGLKPAKQPWLNLYNYYPPKYANSKLKYTDQFRFLDKAAILTPEDKLQPDGKPADPWKLCTMQQVEEVKCIVRVLPIWFASSIYYLTITQQMTYPVFQALQSDRRLGSGGFVIPAATYVVFLMTGMTVFIVVYDRVLVPTMRRITGLDTGITLLQRIGTGIFFATASLVVAGFVEERRRTFALTKPTLGMAPRKGEISSMSAMWLIPQLSLAGVAEAFAAIGQMEFYYKQFPENMRSFAGSIFYVGGGVSSYLGSFLIATVHRTTQNSSGGNWLAEDLNKGRLDLFYFMIAGILAVNFAYFLVMSRWYRYKGSDDEVTTYETNENIIKQQDKNVA

SEQ ID NO: 266 - DNA, 1863 bp, Arabidopsis thaliana
  CDS (1)..(1863)
atggttttggaggatagaaaggacggttcttctttgccgggacgatccggtagtttctctaaatcgtcaccgtcggagttggatgttgttgatccctacaagcggataagttcgccgggatctatattggatgctgagaaggtagagaaaaagcctggaggatggagagccgtctcgttcattttaggaaatgagacgctggagagactgggatcgataggattgttggcaaacttcatggtttatctaaccaaagtgtttcacttagaacaagtcgacgctgcaaatgtcatcaacatttggtcaggtttcaccaatctcactcctctcgtcggagcgtatatctcagacacttatgttggccgcttcaagaccatcgctttcgcctcattcgccactctcctcggactaataacaattacactcacagcatcgtttcctcaactccacccagcatcatgcaacagccaggacccactcagttgcggcggtccgaataagctccagatcggagttttgctattgggactctgtttcctctccgtagggagtggaggaatacgaccttgtagcatcccttttggggttgatcagtttgaccaacgaactgaggaaggggttaaaggagtggccagtttcttcaactggtattacatgactttcactgtggttctgatcattacacagaccgtagttgtgtatatccaggatcaagtcagttggattatcggttttagtatccctaccggactcatggctcttgcggttgttatgttttttgccggaatgaagcgttatgtctacgttaaaccagaaggaagtatattctctgggatcgctcaagttatcgtggcagctcgtaagaagcgaaagctgaaacttccggcggaagatgacggcactgtcacctattacgacccagccatcaagtctagcgtgttatccaagttacaccgcagtaaccaattcaggtgtcttgacaaagccgcggtggttatagaaggtgacctaacacccgagggacctcccgcagacaagtggcggttatgcagcgtccaagaagtggaagaagtgaagtgtttgatccgaattgttcctatctggtcggccggaataatctcactcgcggccatgacaacacaaggcactttcacggtctctcaagctttgaaaatggatcgaaacttaggtcctaaattcgagattccggctggttcactctccgtcatctctctcctcacaatcggcatctttcttcccttctacgaccgcgtttttgtaccattcatgcggcgaatcaccggccataaatccggaatcacactcctccaaaggataggaacagggatcgttttcgcgatcttttctatgatcgttgcgggcattgtggagcgtatgagacgcatacgctccatcaatgccggagatccaacgggaatgactccaatgtcggtgttttggctttcgccgcagctaattctcatgggactatgtgaagcattcaatatcatcggacaaattgagttcttcaacagtcagtttccagagcacatgagaagtatcgctaactctctcttctctttatcgttcgccggttcgagctaccttagtagtttccttgtgactgtcgttcataaattctccggtgggcatgatcgtccggattggctaaacaagaatctcaacgcgggaaaattggattacttctattatctgattgcggttttgggtgtggttaatctggtttacttttggtattgtgctcggggataccggtacaaggtcggtttaccgattgaagactttgaggaggacaagtcctccgatgatgttgagatgacttcgaagaaatcgatgaaatga

SEQ ID NO: 267 - protein, 620 aa, Arabidopsis thaliana
MVLEDRKDGSSLPGRSGSFSKSSPSELDVVDPYKRISSPGSILDAEKVEKKPGGWRAVSFILGNETLERLGSIGLLANFMVYLTKVFHLEQVDAANVINIWSGFTNLTPLVGAYISDTYVGRFKTIAFASFATLLGLITITLTASFPQLHPASCNSQDPLSCGGPNKLQIGVLLLGLCFLSVGSGGIRPCSIPFGVDQFDQRTEEGVKGVASFFNWYYMTFTVVLIITQTVVVYIQDQVSWIIGFSIPTGLMALAVVMFFAGMKRYVYVKPEGSIFSGIAQVIVAARKKRKLKLPAEDDGTVTYYDPAIKSSVLSKLHRSNQFRCLDKAAVVIEGDLTPEGPPADKWRLCSVQEVEEVKCLIRIVPIWSAGIISLAAMTTQGTFTVSQALKMDRNLGPKFEIPAGSLSVISLLTIGIFLPFYDRVFVPFMRRITGHKSGITLLQRIGTGIVFAIFSMIVAGIVERMRRIRSINAGDPTGMTPMSVFWLSPQLILMGLCEAFNIIGQIEFFNSQFPEHMRSIANSLFSLSFAGSSYLSSFLVTVVHKFSGGHDRPDWLNKNLNAGKLDYFYYLIAVLGVVNLVYFWYCARGYRYKVGLPIEDFEEDKSSDDVEMTSKKSMK

SEQ ID NO: 268 - DNA, 1743 bp, Oryza sativa (japonica cultivar-group)
  CDS (1)..(1743)
atgggagaggttgcagaagacatctacacccaagatggcaccgtggacgtcaagggcaacccggccaccaagaagaacaccggcaactggcgtgcctgcccctacatcctcgctaacgagtgctgcgagaggctggcctactatggcatgagcaccaacctcgtgaactacatgaagacgcggctcgggcaggagagcgccattgccgccaacaatgtcaccaactggtcggggacttgctacatcaccccccttctcggtgccttcttggctgatgcctacatgggcaggttctggaccattgccagcttcatgatcatctacatcctgggtttggcgttgctgacaatggcgtcgtcggtgaaggggctggtgccggcgtgcgacggaggagcgtgtcacccgacggaggcgcagacgggggtggtgttcttggcgctgtacctgatagcgctgggcaccggcgggatcaagccgtgcgtgtcgtcgtttggcgcggaccagttcgacgagaacgacgagggggagaagcggagcaagagcagcttcttcaactggttctacttctccatcaacatcggcgcgctggtggcgtcgtcggtgctggtgtacgtgcagacgcacgtcgggtgggggtgggggttcggcatcccggccgtcgtcatggccgtcgccgtcgccagcttcttcgtcggcacgccgctgtacaggcaccagcggcccgggggcagcccgctgacgaggatcgcgcaggtgctcgtcgcgtcggcgaggaagtggggcgtcgaggtccccgccgacgggtcgcggctgcacgagacgctcgacagggagtccggcatcgagggcagccgcaagctggagcacaccgggcagttcgcgtgcctcgacagggcggcggtggagacgccggaggacaggtcggcggcgaacgcgtcggcgtggcggctgtgcacggtgacgcaggtggaggagctgaagagcgtggtgcggctgctgccgatctgggcgagcgggatcgtgttcgcgacggtgtacgggcagatgagcaccatgttcgtcctccaggggaacacgctcgacgccagcatggggccgcacttctccatcccggcggcgtcgctctccatcttcgacaccctcagcgtcatcgtctgggtgccggtgtacgaccgcctcatcgtgccggcggtgcgcgccgtgacggggcgcccacgcgggttcacccagctgcagcggatgggcatcggcctcgtcatctccgtcttctccatgctcgccgccggcgtgctcgacgtcgtcaggctgcgcgccatcgctcgccacgggctctacggcgacaaggacgtcgtgcccatctccatcttctggcaggtgccgcagtacttcatcatcggcgccgccgaggtgttcacgttcgtcgggcagctggagttcttctacgaccaggctcccgacgccatgcgcagcatgtgctcggcgctgtcgctcaccaccgtcgcgctaggcaactacctcagcacgctgctcgtgaccatcgttacccatgtcaccacccggaacggcgccgtcgggtggatcccggacaacctcaaccgcggccacctcgactacttcttctggctgctcgccgtgctcagcctcatcaacttcggcgtctacctcgtcatcgccagctggtacacctacaagaagacggcggattcaccggacgacaaggccgagcacgccggagcaaactga

SEQ ID NO: 269 - protein, 580 aa, Oryza sativa (japonica cultivar-group)
MGEVAEDIYTQDGTVDVKGNPATKKNTGNWRACPYILANECCERLAYYGMSTNLVNYMKTRLGQESAIAANNVTNWSGTCYITPLLGAFLADAYMGRFWTIASFMIIYILGLALLTMASSVKGLVPACDGGACHPTEAQTGVVFLALYLIALGTGGIKPCVSSFGADQFDENDEGEKRSKSSFFNWFYFSINIGALVASSVLVYVQTHVGWGWGFGIPAVVMAVAVASFFVGTPLYRHQRPGGSPLTRIAQVLVASARKWGVEVPADGSRLHETLDRESGIEGSRKLEHTGQFACLDRAAVETPEDRSAANASAWRLCTVTQVEELKSVVRLLPIWASGIVFATVYGQMSTMFVLQGNTLDASMGPHFSIPAASLSIFDTLSVIVWVPVYDRLIVPAVRAVTGRPRGFTQLQRMGIGLVISVFSMLAAGVLDVVRLRAIARHGLYGDKDVVPISIFWQVPQYFIIGAAEVFTFVGQLEFFYDQAPDAMRSMCSALSLTTVALGNYLSTLLVTIVTHVTTRNGAVGWIPDNLNRGHLDYFFWLLAVLSLINFGVYLVIASWYTYKKTADSPDDKAEHAGAN

SEQ ID NO: 270 - DNA, 1758 bp, Oryza sativa (japonica cultivar-group)
  CDS (1)..(1758)
atggagggtttaaggggcggcggccatggcgaggcggcggtggacggcggcgacgagaggtgggtggaggactcgtcggtggattaccaagggcggcctcctctccgcgccgccaccggatcatggaaggccgcaatgttcatcatcttgattgagttcagcgagaggctgagctacttcgggctagcgacgagcttgatgatctacctgaccaaggttctccaggaggagatgaagttcgccgccaagaatgtcaactactggaccagcgtcaccaccctcatgcccctcgtcggcggcttcctcgccgacggctacctcggccgcttctccactgtcctcttctccactctcatctacctctcggggttgattctgctggcgatatcgcagctgtcgccgaggctgaaacccgagcgcaacctgcacctccacgagacgctcttcttcgtggcgatctacctggtgtcggtcggcaccggcgggcacaagccggcgctggagagcttcggcgccgaccagttcgacgacggccacgcggcggagcgggtgcagaagatgtcctacttcaactggtggaactgcgcgctctgcgccggcgtcctgctcggcgtcaccgtcatcgtctacctccaggagaaggtcggctggggcgccgccgccgtcgtgctcgccgccgtcatggccgcctccctcgccgtcttcctcgccggctggcgccactaccggtacagggtccccgagggcagcccgctcacgccgctcgtccgcgtcctcgtcgccgccgcgaggaagaggcacctccacctccccgccgacgccaacgagctctacgaggtgaagccgcagaatatcaagaggcggctgctctgccataccgatcaacttaggtttcttgacaaggcggccgtagtggagcacgacggcggcgaggagcggcgcggggcgtggcggttggcgacggtgacgcaggtggaggagacgaagctggtgctggcgatggtgcccatctgggtggcgacgctgccgttcggcatcacggcggcgcaggtgtccaccttcttcatcaagcagggcagcgtgatggaccgccgcatgggcccgcacttcacgctgccgccggcgtccaccttcgccatggccgccatcggcatgatcgtcgccgtggccgtgtacgacaaggtcctggagccgtacctgcgccgcctgaccggcggcgagcgcgggctcagcatcctgaagcgcatcggcgtcggcatcgcgttcaccatcgtggccatggcggtggcggcgacagtggagaggcagcgcctccgcagcgcctcgccggcgtccatgtcggtgttctggctggtgccgcagttcttgctgatgggcatcggcgacgggttcgcgctggtcggtctccaagaatacttctacgaccaggtgccggacagcatgcgcagcctcggcatcggcctctacctcagcgtcatcggcgccggcagcttcctgagcagccagctgatcacggcggtggaccgcgtcacctcgcacggcggcgccgccgccggctggttcggcaaggacctgaacagcagcaggctggacctcttctactggcttctcgcctgcatcggcgtcgccaacctcgtcttctacgtggtcatcgccaccaggtactcgtacaagaccgtcatggccggcggcaaggtcgtcgacgacaaggccggcgacatcgagtgcgccgccgccgcagctgctgctgcctactga

SEQ ID NO: 271 - protein, 585 aa, Oryza sativa (japonica cultivar-group)
MEGLRGGGHGEAAVDGGDERWVEDSSVDYQGRPPLRAATGSWKAAMFIILIEFSERLSYFGLATSLMIYLTKVLQEEMKFAAKNVNYWTSVTTLMPLVGGFLADGYLGRFSTVLFSTLIYLSGLILLAISQLSPRLKPERNLHLHETLFFVAIYLVSVGTGGHKPALESFGADQFDDGHAAERVQKMSYFNWWNCALCAGVLLGVTVIVYLQEKVGWGAAAVVLAAVMAASLAVFLAGWRHYRYRVPEGSPLTPLVRVLVAAARKRHLHLPADANELYEVKPQNIKRRLLCHTDQLRFLDKAAVVEHDGGEERRGAWRLATVTQVEETKLVLAMVPIWVATLPFGITAAQVSTFFIKQGSVMDRRMGPHFTLPPASTFAMAAIGMIVAVAVYDKVLEPYLRRLTGGERGLSILKRIGVGIAFTIVAMAVAATVERQRLRSASPASMSVFWLVPQFLLMGIGDGFALVGLQEYFYDQVPDSMRSLGIGLYLSVIGAGSFLSSQLITAVDRVTSHGGAAAGWFGKDLNSSRLDLFYWLLACIGVANLVFYVVIATRYSYKTVMAGGKVVDDKAGDIECAAAAAAAAY

SEQ ID NO: 272 - DNA, 1776 bp, Oryza sativa (japonica cultivar-group)
  CDS (1)..(1776)
atggagatcggcgccgttgagaacgggggtgtcgtcggtggtgaagttgtggcaggcaagagggggaagacgccgcaagcaactgagacatttgaaaaggttgcgacaattggagtggtagcaaatttgacggtctatcttgtgaagcgcttcaacattgggcaaattgaggcagctaatattaccaacatattcttcggtacgcttaactttgcgccattgctaggcgccttcatctccgacgtctacttgggaaggttcaaaacactagcctatggatgcttcgccagcctcctggggatgctgggaatgactttgtatgcatcacttccagctctcaagccaccgatctgccatgaaaaaacccgactaggcggaggctgcaacagtccatcaacactccagctaagtgtgctatacctttctctaggctttctaattatcggtggaggagcgatccggccttgtagcttgccctttggagtagaccagtttgataagaccgacgaagaaggtcgaaagggactaaacagctattataattggtactatggaacaagtactgctgcccttgtgttatctatgattgtcatcatctacatccagaacaatgtcagctggccaataggatttggcatacccacattactcatgtttctcgccattatcatgttatttctgggtaccaacctgtacgtccatgtacaaccagagggaagcatatttgctggaattgcccaggttttagtggcttcatttaaaaagagaaatctcaagcttccttgtcctcatgatataaaccaacaaggattgatgctctacaaccctccttccaagggcaaccgcgtattcagattgccacttacttcccagttcaggtttctgaacaagggtgcaattgtaatgggtgatgatataaatgttgatggttctgcaagaaactcttgggagctttgcaacgtccaacaaatagaggaggtcaaatgcttaataagaattgtgccggtttgtatttctggagtcttatgctttgtcgcattggctcagcaattcacctatataatcttgcaaacatttacaatggactgtcactttgggacgcactttgaaatcccagcaggctctgttgtatccatatcccttattgccctaactctattcatccccatttatgaccggattttagtaccaatagctagaggattcactggagtggaaagtggtattacacttctacagagacagggtataggattggccatttctcccatttcaatggtggtagcaggacttgtcgaacgtaagaggaggaactcagccttgtcgaatggaggaatatcgcctatgtcagtcttgtggcttgcaccccaacttgttttaatgggtattgctgaggccttcaatgcagttggacaaatagaattctacaataagcagtttccagagaacatgcaaaccctagcaggatctctgttcttctgtactatagctggagcaaactacctgagtactgctctggcaaacatcatgagaaaggtcacgaccagagatggtcactcaagctggttaacagacaacattaatcttggcaaactcgactattacttctattttattgcccttatgggagtcctgaaccttatttattttcttatatgctcacacttctaccaatataaggtaatgtcactccattctgaagaatccatcaaaatacctaccaaggaagaagaagccacagagatcgacattgacacagatgcacctagcaaatga

SEQ ID NO: 273 - protein, 591 aa, Oryza sativa (japonica cultivar-group)
MEIGAVENGGVVGGEVVAGKRGKTPQATETFEKVATIGVVANLTVYLVKRFNIGQIEAANITNIFFGTLNFAPLLGAFISDVYLGRFKTLAYGCFASLLGMLGMTLYASLPALKPPICHEKTRLGGGCNSPSTLQLSVLYLSLGFLIIGGGAIRPCSLPFGVDQFDKTDEEGRKGLNSYYNWYYGTSTAALVLSMIVIIYIQNNVSWPIGFGIPTLLMFLAIIMLFLGTNLYVHVQPEGSIFAGIAQVLVASFKKRNLKLPCPHDINQQGLMLYNPPSKGNRVFRLPLTSQFRFLNKGAIVMGDDINVDGSARNSWELCNVQQIEEVKCLIRIVPVCISGVLCFVALAQQFTYIILQTFTMDCHFGTHFEIPAGSVVSISLIALTLFIPIYDRILVPIARGFTGVESGITLLQRQGIGLAISPISMVVAGLVERKRRNSALSNGGISPMSVLWLAPQLVLMGIAEAFNAVGQIEFYNKQFPENMQTLAGSLFFCTIAGANYLSTALANIMRKVTTRDGHSSWLTDNINLGKLDYYFYFIALMGVLNLIYFLICSHFYQYKVMSLHSEESIKIPTKEEEATEIDIDTDAPSK

SEQ ID NO: 274 - DNA, 1638 bp, Oryza sativa (japonica cultivar-group)
  CDS (1)..(1638)
atggagggcgtggaatcgaatgaccggcacggcggcgccgccgccgaccgccggaagtcaaatcgccggaatcggtgggcctgcaccttcatcctcgcgaacaatttcttccaaaacatggcctacttcggcgtgtcgacgaacctggtgaactacctcaagtacaggctgcacgagggcagcaagtcggcggcgaacaacgtcaccaactgggagggcaccggctccattgcgccgctcgtcgccggctacctcgccgacgccttcctcggccgatactggaccatcgtgctctccatggtcatctccgccgtggtacgttcgtcgccgccgccggccatgcagggctatggcgtgctggcggcgagcgcgtcggtgatcaggctggagagcgcggcgctgtacgccgggatgtacctggtggcgctcggcggcgtgctggagccgatcatggcgccgttcggcgccgaccagttcgacgacggcgaggacgatcagcgcggccggcggcagagctccttcttcaactggttctacctctcgctcaactgcggctcgctcgtcggcggcaccgtgctggtgtgggtgcagaccagcgtcgggtggggggtcgggtacggcgtcccggcgatcttcagcgcgctgtccgtcgccgtgttcctcgccggcaccgccacgtaccggcgggaccagccgccggggggcagcccgctgacgaggatcgcgcaggtggtggtcgccgcggtcaggaagttcgacgtggagataccgtcggactcgtccatgctgtacgagagcgacgccgtcgatggcatgccggcgatacatggccgccgccgactcctccacaccggtcagtttaggttcttggacagagctacggtgaagactgccggcgagaaggcggcgcagagcccgtggcgactgtgcacggtgacacaggtggaagagctcaagtgcgtgctccggctgctgccggtgtgggcgaccggcatcatctacgcggcggcgtacacccaggtgaccaccaccttcatcctccagggcgacacgctggaccgcagcctcggccgcttcaaggtacccgccgccgcgctctccatcttccacaccctcagcgtcattctctgggtggcgctctacgaccgcgccatcgtgccgctggcgcgccgcgtgacgcgccacgacggcgggttcacgcagctggcgcggatgggcgtcggcctcgtcatcctcaccgtcgccatggccgccgccggcgcgctcgaggcggcgcgccgccggctgatcgcgcggccgtcggtgttctggcaggtgccgcagtacgcggtggtgggcgcgtcggaggtgttcacgctgatcgggcagatggagttcttctacgaccaggcccccgacgccatgcgcagcctctgctcggcgctctccagcacgtcgttcgcgctcggcgactacgccagctcggcgctcgtcgtcgtggcggcgcgcaggggcggcgcgcccgggtggatccccgacgacatcaaccgcggccacctcgactacttcttctggctgctcaccgcgctctgcgtcgccaacttcgccgcctacctcctcatcgcacgctggtacacgtataagaagaccgtagactag

SEQ ID NO: 275 - protein, 545 aa, Oryza sativa (japonica cultivar-group)
MEGVESNDRHGGAAADRRKSNRRNRWACTFILANNFFQNMAYFGVSTNLVNYLKYRLHEGSKSAANNVTNWEGTGSIAPLVAGYLADAFLGRYWTIVLSMVISAVVRSSPPPAMQGYGVLAASASVIRLESAALYAGMYLVALGGVLEPIMAPFGADQFDDGEDDQRGRRQSSFFNWFYLSLNCGSLVGGTVLVWVQTSVGWGVGYGVPAIFSALSVAVFLAGTATYRRDQPPGGSPLTRIAQVVVAAVRKFDVEIPSDSSMLYESDAVDGMPAIHGRRRLLHTGQFRFLDRATVKTAGEKAAQSPWRLCTVTQVEELKCVLRLLPVWATGIIYAAAYTQVTTTFILQGDTLDRSLGRFKVPAAALSIFHTLSVILWVALYDRAIVPLARRVTRHDGGFTQLARMGVGLVILTVAMAAAGALEAARRRLIARPSVFWQVPQYAVVGASEVFTLIGQMEFFYDQAPDAMRSLCSALSSTSFALGDYASSALVVVAARRGGAPGWIPDDINRGHLDYFFWLLTALCVANFAAYLLIARWYTYKKTVD

SEQ ID NO: 276 - DNA, 1785 bp, Oryza sativa (japonica cultivar-group); identical to SEQ ID NO: 41
  CDS (1)..(1785)

SEQ ID NO: 277 - protein, 594 aa, Oryza sativa (japonica cultivar-group); identical to SEQ ID NO: 42

SEQ ID NO: 278 - DNA, 1755 bp, Oryza sativa (japonica cultivar-group)
  CDS (1)..(1755)
atggctccaactgctgtcgattcgaaaaggatttctgacatcactgaagatggatcaatggacaggcgaggaaatccggcagttaaagcaaaaactgggaattggagatcttccatcctcttgctagtcaactatgggctcgtgacatgcgccttcttcggcgtcggggtgaaccttgtggtgttcctgcggcgggtgctccaccaggacaacgcagaggcagccaacagcatcagcaagtggaccggcacggtctacatcttctccctcatcggcgccttcatgagcgactcctactggggccgatacatcacgtgtgcaatcttccagatgatctatgtcacgggcctggtgatactgtcactcgcgtcgtggttcttgctggtgaagcccaccggctgcggcgccgcgggggagcactgcgacgcgccgtcgagcgccggcgtcgcgctcttctacctgtcgacctacatgatcgcgttcggcaacggagggtaccagccgtccatcgccacgttcggctccgaccagttcgacgagacggaccccagggaggcccgctccaaggtggccttcttcagctacttctacctggcgctcaacgtgggctccctcttctccaacacggtgctggtgtactacgaggacgaggggaggtgggtcatggggttctgggtctcggccgcggcggcggccatggcgctcgtgctcttcttgctcggcacccccaactaccgccacttcaagccgaccggcaacccgttgacccgcatcgcgcaggtgttcgtcgccgcgttccgcaagtggcgcgccgaggtgccacgcagcgagctcctgcacgaggttgacggcgacgagtcccagattgctggcatccgaaagatcctccacagcgaccagatcaggttccttgacaaggcggcgacggtcaccgaggaggactactgcacgccggagaacatgcaggatccgtggaggctgtgcacggtgacccaggtggaggaagtgaagtgcatcctgaagatgctgcccatctggctgtgcacgatcgtatactcggtggtgttcacccagatggcgtcgctgttcgtggagcagggaaccaccatgaacaccaacatcgggtcgttccacgtgcccgcggcgagcatgtcggtgttcgacatcctcagcgtgctggcgttcatcgccatctaccggcgcgtgctcgtgccggtcatgtcgcgcctgtccggcaacccgcaggggctgaccgagctgcagcggatgggcgtggggctcgtggtcggcatggcggccatggtggtcgccggcgtggtggaggtggagcggctgaagcgggtgggcgcgccggaccagccgagctccctgagcgtgctgtggcaggtgccgcagtacgcgctgatcggggcgtcggaggtgttcatgtacgtggggcagctggagttcttcaacgggcaggcccccgacggcgtgaagagcttcgggagctcgctgtgcatggcgtccatctcgctggggaactacgtgagcatcatgctggtgagcgtggtcaccagcctcaccgccggcgacaggcggcccgggtggatccccgggaacctcaactccggccacctcgacaggttctacttcctcctcgccgcgctctcgctggtcgacctcgccgtgtacgtcgcgtgcgccgtgtggtacaagggcatcaagctcgacagcaacgaggagaaggcgaacaagatcaccgtgcacgtttag

SEQ ID NO: 279 - protein, 584 aa, Oryza sativa (japonica cultivar-group)
MAPTAVDSKRISDITEDGSMDRRGNPAVKAKTGNWRSSILLLVNYGLVTCAFFGVGVNLVVFLRRVLHQDNAEAANSISKWTGTVYIFSLIGAFMSDSYWGRYITCAIFQMIYVTGLVILSLASWFLLVKPTGCGAAGEHCDAPSSAGVALFYLSTYMIAFGNGGYQPSIATFGSDQFDETDPREARSKVAFFSYFYLALNVGSLFSNTVLVYYEDEGRWVMGFWVSAAAAAMALVLFLLGTPNYRHFKPTGNPLTRIAQVFVAAFRKWRAEVPRSELLHEVDGDESQIAGIRKILHSDQIRFLDKAATVTEEDYCTPENMQDPWRLCTVTQVEEVKCILKMLPIWLCTIVYSVVFTQMASLFVEQGTTMNTNIGSFHVPAASMSVFDILSVLAFIAIYRRVLVPVMSRLSGNPQGLTELQRMGVGLVVGMAAMVVAGVVEVERLKRVGAPDQPSSLSVLWQVPQYALIGASEVFMYVGQLEFFNGQAPDGVKSFGSSLCMASISLGNYVSIMLVSVVTSLTAGDRRPGWIPGNLNSGHLDRFYFLLAALSLVDLAVYVACAVWYKGIKLDSNEEKANKITVHV

SEQ ID NO: 280 - DNA, 1725 bp, Oryza sativa (japonica cultivar-group)
  CDS (1)..(1725)
atggcgttgaacgcgttcgcccagcccgtcaccaactacctcatcaaacgttacaacatgaagccgaatgccgcaacaaacgtggccaacgtcttcagtggcacctacagcttctcgccggtggtcggagccttcgtcgccgatgcgttctgcggcaggttctggaccctcttgttcggagccgtcgccgcctttgttgcaatggtggtcatcacgctatcggcgacgatccgtcagctcaagccaccgtcgtgcagcgacgtggcacggcaagccggcacgtgcgcggggccgtcgggcctccaccgcgccgtgctctacatcggcatggcgctgctcgtcgtggccacgggcggcgcgaacccgaccagcctgccgttcggcgcggaccagttcgaccacgacgacgcgagcagcggcagcagcagcaacgaagccgacgagcgacgacggcgcgccgaggagcccgcggggctcaagcgcttctacaactggtactacgtggtcaccatgatggcctcgttcatggcgctcaccttcatcgcgtacatccaggacaaggtgagctggggcctcggcttcggcatccccacggcgctcgtggccgccaccttcgccgtgttcctcgccggcacgccgctgtacgtccgcgtgccggccgagggcagcatcttctcgagcgtcgcgcgggtggtcgtcgcgtcgtgccggaagcggaggctcacgctgcctcacccgcgcgacgcgcggcagcaggaggccgttctgtacaatcctcccgtcgtcgtcgcagctggaacgggaaccagccgcgtcttcaagctcccactcacgttgcagctgagctttctgaacaaggcggccattgtaaccgccgacgccgacgagatacggccggacggatctccggcgaggccgtggagcctgtgcagcgtgcagcaggtggaggaggtgaagtgcctcgtcaagatcgtccccgtgtggatctccggcgtgatgtggttcatctcggtggcggagctgaccaactacacgttcctgcaggccctgaccatggacctccacatgggcaggagcttcaccatcccgcccgtgtcgatcgccgccatattcaacctcgccatcgtgctcttcgtgccggtctacgatctgctcgtcgcccgcgcagcgcagcgcgtcaccggggtggagggcggcatcacggtgctgcagaggcagggcgtcggcgtggcgatcagcggcctggcgctcgtggtcgcggccgtcgtcgagcgcaggcgccgggcctccgccttggacaacggcgggacgtcgccgatgtcggtgttcgtgctcgcgccgcagctcgccgtgatgggcgtctcggcggcgttcaacatgatcgggcagatggagttctacaacacggagttcccggaccagatgcgcacgctcgccaacgcggcgttctactgcgcgcagggggcgagcagctacctggccacggcggttgtgaacgtcgtgaacgcgaggacgaggcggcgcggcggcgggcagggctgggtcgccgaggacatcaacgccgggaagctggaccacttctactacgccatggccgtgttcgcggcgatcaacttcgtctacttcctcgtctgctcctacttctaccgctacaagggcgagccagaggtggcggccgaggactcgccaccggccactccagaggccgtcctcctgaagcactag

SEQ ID NO: 281 - protein, 574 aa, Oryza sativa (japonica cultivar-group)
MALNAFAQPVTNYLIKRYNMKPNAATNVANVFSGTYSFSPVVGAFVADAFCGRFWTLLFGAVAAFVAMVVITLSATIRQLKPPSCSDVARQAGTCAGPSGLHRAVLYIGMALLVVATGGANPTSLPFGADQFDHDDASSGSSSNEADERRRRAEEPAGLKRFYNWYYVVTMMASFMALTFIAYIQDKVSWGLGFGIPTALVAATFAVFLAGTPLYVRVPAEGSIFSSVARVVVASCRKRRLTLPHPRDARQQEAVLYNPPVVVAAGTGTSRVFKLPLTLQLSFLNKAAIVTADADEIRPDGSPARPWSLCSVQQVEEVKCLVKIVPVWISGVMWFISVAELTNYTFLQALTMDLHMGRSFTIPPVSIAAIFNLAIVLFVPVYDLLVARAAQRVTGVEGGITVLQRQGVGVAISGLALVVAAVVERRRRASALDNGGTSPMSVFVLAPQLAVMGVSAAFNMIGQMEFYNTEFPDQMRTLANAAFYCAQGASSYLATAVVNVVNARTRRRGGGQGWVAEDINAGKLDHFYYAMAVFAAINFVYFLVCSYFYRYKGEPEVAAEDSPPATPEAVLLKH

SEQ ID NO: 282 - DNA, 1857 bp, Oryza sativa (japonica cultivar-group)
  CDS (1)..(1857)
atgaccctgcctccctccgtctccggctccggcggcggcggcgacctcgaggcccacctcgacggcgacgtgggaaacggcaatgccagatcagactccgcggcggcggcggcggcgccggagctccggtaccgggggtggaaggcgatgccgttcgtgatcggcaacgagacgttcgagaagctgggcagcatcggcacggcggcgaacctcatggtgtacctcaccaccgtcttccacatgtccagcctcgacgccgccgtcgcgctcaacgtgttcgctggcaccaccaacctcgccaccgtcgtcggcgccttcgcctccgacctctacctcggccgctacgccaccgtcgccgccggctgcgtctccaccttcatcgggatggtcatcttgacgatgacggccggcgtgccggcgctgcacccgccgccgtgcggcgaggggaggtgtttgggcgcgacgagggggcagctcgcggtgctcgggctggcgttcgcgttcatcgtggccggcgccggcgggatccggccgtgcagcctgccgttcggcgccgaccagttcgacccgcgcacggagtccggccgccgcggcatcaacagcttcttcaactggtactacttcacgctcaccatcgccgtctgcgcctcgtcgacggcgatcgtctacgtgcagagcagcgtgagctggtgggtcgggctcgccatcccggcggcgctcatgctcgcctcctgcgccctcttcttcgccggcgcggggctctacgtccgcgtgcgccccgaggggagccccttcgccggcgtcgcgcgcgtcgccgtcgccgcgttccggaagcggtcggccgccgcgccctccgacgccgacgagtccctcttccggacgcgccacgccagcggcgtcgtgtcgaggctcccctacaccgaccagttcaggttcctcgacaaggccgccgtcgtggtcgacgccaagagcgaggtgggcggcgacgggcaccccaagaatccatggcggctgtgcagcctccagcaggtggaggaggccaagtgcatcctccgcgtcgtccccgtgtggctcacctgcatcgtctactacgtcgcgttcgcgcagacgaacacctacgtcatcctccaggcggcgcagtccgaccgccacctcggcggcggcggcggcgccgggagcttcgaggtgccaccgggctcgttcaccgtcttccccatgctggcgctcgccgtctggatcccgctctacgaccgcctcgtcgtgccatgggcgcgccgcctcacggggcgcgagggcggcatcacgccgctccagcggatgggcgtcggcatggcgctgtccgtcctcgccatgctcgtcgccgccatggccgagaagcggcggcgcgacctcgccgccggctcgccgtcgaacaccggccgggtgtcgcggcagtcggcgttctggctggtgccgcagctcgccgcgctggggctatcggaggcgttcaaccaggtgagccagacggagttctactacagggagttcccggagagcatgcggagcgtcgccgggtcggtgctgttcagcgggctggcgctgtcgagctacctgagcggggtgctggtcgccgccgtggagcgcgccacgaggggcgccagcgccggggacgacggcgggtggctcgccgaggacctgaacaaggggaggctggactggttctacctcctcatcgccgccattggggcggccaacttcttggcgttcgtcgcgtgcgccaagtggtacaggtacaagggctctgatgatgatgacgatgatgaccatgagcatgagcaggttaacgttgcagataggattagtgctgctgctgcttaa

SEQ ID NO: 283 - protein, 618 aa, Oryza sativa (japonica cultivar-group)
MTLPPSVSGSGGGGDLEAHLDGDVGNGNARSDSAAAAAAPELRYRGWKAMPFVIGNETFEKLGSIGTAANLMVYLTTVFHMSSLDAAVALNVFAGTTNLATVVGAFASDLYLGRYATVAAGCVSTFIGMVILTMTAGVPALHPPPCGEGRCLGATRGQLAVLGLAFAFIVAGAGGIRPCSLPFGADQFDPRTESGRRGINSFFNWYYFTLTIAVCASSTAIVYVQSSVSWWVGLAIPAALMLASCALFFAGAGLYVRVRPEGSPFAGVARVAVAAFRKRSAAAPSDADESLFRTRHASGVVSRLPYTDQFRFLDKAAVVVDAKSEVGGDGHPKNPWRLCSLQQVEEAKCILRVVPVWLTCIVYYVAFAQTNTYVILQAAQSDRHLGGGGGAGSFEVPPGSFTVFPMLALAVWIPLYDRLVVPWARRLTGREGGITPLQRMGVGMALSVLAMLVAAMAEKRRRDLAAGSPSNTGRVSRQSAFWLVPQLAALGLSEAFNQVSQTEFYYREFPESMRSVAGSVLFSGLALSSYLSGVLVAAVERATRGASAGDDGGWLAEDLNKGRLDWFYLLIAAIGAANFLAFVACAKWYRYKGSDDDDDDDHEHEQVNVADRISAAAA

SEQ ID NO: 284 - DNA, 1740 bp, Hordeum vulgare
  CDS (1)..(1740)
atgggggaggtcgcggcagagatgtacacccaggacggcaccgtcgacatcaagggcaacccggccctcaagaaagacaccggcaactggcgcgcctgcccctacatcctcgcgaacgagtgctgcgagcggctggcctactacggcatgagcaccaacctggtcaacttcatgaaggaccggatgggcatggccaacgcggcggctgccaacaacgtcaccaactggggcggcacctgctacatcaccccgctcatcggcgccttcctcgccgacgcctacctcggccgcttctggaccatcgcctccttcatgatcatctacatcttcggcctgggcctgctcaccatggccacctccgtgcacggcctcgtgcccgcctgcgcctccaagggcgtgtgcgaccccacgcccggccagtccgccgcggtcttcatcgcgctctacctcatcgcgctcggcaccggcgggatcaagccctgcgtctcatccttcggggccgaccagttcgacgagcacgacgacgtggagcgcaagagcaagagctccttcttcaactggttctacttctccatcaacatcggcgcgctggtggcctcgtcggtgctggtgtacgtgcagacacacgtcggctggagctggggcttcggcatccccgccgtcgtcatggccatcgccgtcggcagcttcttcgtcggcacgtcgctgtaccgccaccagcgccccggcggcagcccgctcacccgcatcgcacaggtgctcgtcgccgccacgcgcaagctgggcgtcgccgtcgacgggtcggcgctgtacgagaccgcggacaaggagtccggcatcgaggggagccgcaagctggagcacacgcggcagttcaggttcctcgacaaggcggcggtggagacgcatgccgacaggacggcggccgcgccgtcgccctggcggctgtgcacggtgacgcaggtggaggagctcaagagcgtggtgcgcctgctgcccatctgggcaagcggcatcgtgttcgccacggtgtacgggcagatgagcaccatgttcgtgctccaaggcaacaccctggacgcctccatggggcccaagttcaagatcccctccgcctccctctccatcttcgacaccctcagcgtcatcgcctgggtgcccgtctacgaccgcatcctcgtccccgccgtgcgctccgtcaccggccggccgcgcgggttcacgcagctccagcgcatgggcatcggcctcgtggtctccatgttcgccatgctcgccgccggcgtgctcgagctcgtccgcctccgcaccatcgcgcagcacgggctgtacggggagaaggacgtggtgcccatctccatcttctggcaggtgccgcagtacttcatcatcggctgcgccgaggtgttcaccttcgtggggcagctcgagttcttctacgaccaggcgcccgacgccatgaggagcatgtgctccgcgctctcgctcaccaccgtggcgctcgggaactacctcagcacgctgctcgtcacggtggtggccaaggtgaccaccaggggaggcaagcaagggtggatcccggacaacctcaacgtcggccacctcgactacttcttctggctgctcgccgcgctcagcctcgtcaacttcgccgtctacctgctcatcgccagctggtacacctacaagaagaccgccggagattctccggacgccaaaggaggagctcatgatcagtga

SEQ ID NO: 285 - protein, 579 aa, Hordeum vulgare
MGEVAAEMYTQDGTVDIKGNPALKKDTGNWRACPYILANECCERLAYYGMSTNLVNFMKDRMGMANAAAANNVTNWGGTCYITPLIGAFLADAYLGRFWTIASFMIIYIFGLGLLTMATSVHGLVPACASKGVCDPTPGQSAAVFIALYLIALGTGGIKPCVSSFGADQFDEHDDVERKSKSSFFNWFYFSINIGALVASSVLVYVQTHVGWSWGFGIPAVVMAIAVGSFFVGTSLYRHQRPGGSPLTRIAQVLVAATRKLGVAVDGSALYETADKESGIEGSRKLEHTRQFRFLDKAAVETHADRTAAAPSPWRLCTVTQVEELKSVVRLLPIWASGIVFATVYGQMSTMFVLQGNTLDASMGPKFKIPSASLSIFDTLSVIAWVPVYDRILVPAVRSVTGRPRGFTQLQRMGIGLVVSMFAMLAAGVLELVRLRTIAQHGLYGEKDVVPISIFWQVPQYFIIGCAEVFTFVGQLEFFYDQAPDAMRSMCSALSLTTVALGNYLSTLLVTVVAKVTTRGGKQGWIPDNLNVGHLDYFFWLLAALSLVNFAVYLLIASWYTYKKTAGDSPDAKGGAHDQ

SEQ ID NO: 286 - DNA, 2007 bp, Medicago truncatula
  CDS (1)..(2007)
atggaggagtatgacacgttggatgtccccacaatggtaaatttgaaatctgtaccgttcatgcgattctttcttcctctatatatagtgaatacttccacacactctgtttcatcattaaatctccttgtcttcggctttcatccaaatcaacaacaatcttcctctgcttcatcatttttctcactctttttcttcctttttgtctttgaaactttgtcatcaccaatggcttgcttagaggtctgcaaagaggggaagttcaaagaagaaacagaagagttaactcttgatgggagtgttgattggcatggtcgcccatcaatcagagccacatccgggagatggtttgccggaactattatactcttgaaccaaggtctagcaaccttagcattctttggagttggagtgaacctagttctgttcttgacaagggtgttgggtcaagataatgctgctgctgctaacaatgtcagcaagtggactggcacagtttacatcttctctcttgttggtgctttccttagtgattcttattggggaagatacaaaacatgtgctatctttcaaggcatttttgtaaccggtctagtatctttgtccgttacaacataccttgctttgcttagaccaaaaggttgtggaaatggaaaacttgaatgtggggaacattcaagtttggaaatgggaatgttctacctatcaatctatctgattgccttaggaaatggagggtatcaaccaaacattgcaacatttggtgctgaccaatttgatgaagatcactcaaaggagagttattcaaaagtggcattttttagctacttttacttggcattgaaccttggttcacttttctcaaacactattttgggctattttgaagatgaaggattatgggctcttgggttttgggcttctgctgggtctgcctttttggctcttgtactttttcttgttggcaccccaaaatatagacactttaaaccttgtggcaatcctctttctagattctgccaagtgtttttcgctgcttcaaggaaattgggagttcaaatgacttcaaatggagatgacttgtatgtcatagatgaaaaggagtcttctaacaactccaacagaaagattctccacacacatggcttcaagtttttggatagggcagcttatataacttcaagagatttagaggtccaaaaaggaggccaacataacccatggtatctgtgtcctattactcaagttgaagaagtaaaatgcatactaagacttcttccaatttggctttgcacaataatctactcagtagttttcactcagatggcttccctttttgtggagcaaggtgctgcaatgaaaaccacaatttccagtttcaaaataccaccagcaagcatgtctagcttcgatatcctcagcgtagccatcttcattttcttctaccgtcgagtacttgatccactcgtcggaaaactcaaaaaatcaagttccaagggactcactgaacttcaaagaatgggaatcggtctcgttatagctataatcgcaatggttacagctggaatagttgaatgttacaggcttaagtatgcaaaacaaggtgacacaagctctctaagtatcttctggcaaattcctcagtatgcacttataggagcttctgaggtttttatgtatgtaggacaattagaatttttcaatgctcaaacacctgatggattaaagagctttggaagtgcactttgcatgacaagtatctcacttgggaactatgtgagtagcttaattgttagtattgttatgaagatttcaactgaagatcacatgccaggatggatccctggaaacttgaatagaggtcacttggataggtttttcttcctattggctgttttgacttctttagatttgattgcttatattgcatgtgcaaagtggtttcagaatattcagatggcatgcaaatatgataacaatgacgagcctagtagctgcaaagtttaa

SEQ ID NO: 287 - protein, 668 aa, Medicago truncatula
MEEYDTLDVPTMVNLKSVPFMRFFLPLYIVNTSTHSVSSLNLLVFGFHPNQQQSSSASSFFSLFFFLFVFETLSSPMACLEVCKEGKFKEETEELTLDGSVDWHGRPSIRATSGRWFAGTIILLNQGLATLAFFGVGVNLVLFLTRVLGQDNAAAANNVSKWTGTVYIFSLVGAFLSDSYWGRYKTCAIFQGIFVTGLVSLSVTTYLALLRPKGCGNGKLECGEHSSLEMGMFYLSIYLIALGNGGYQPNIATFGADQFDEDHSKESYSKVAFFSYFYLALNLGSLFSNTILGYFEDEGLWALGFWASAGSAFLALVLFLVGTPKYRHFKPCGNPLSRFCQVFFAASRKLGVQMTSNGDDLYVIDEKESSNNSNRKILHTHGFKFLDRAAYITSRDLEVQKGGQHNPWYLCPITQVEEVKCILRLLPIWLCTIIYSVVFTQMASLFVEQGAAMKTTISSFKIPPASMSSFDILSVAIFIFFYRRVLDPLVGKLKKSSSKGLTELQRMGIGLVIAIIAMVTAGIVECYRLKYAKQGDTSSLSIFWQIPQYALIGASEVFMYVGQLEFFNAQTPDGLKSFGSALCMTSISLGNYVSSLIVSIVMKISTEDHMPGWIPGNLNRGHLDRFFFLLAVLTSLDLIAYIACAKWFQNIQMACKYDNNDEPSSCKV

SEQ ID NO: 288 - DNA, 1767 bp, Hordeum vulgare
  CDS (1)..(1767)
atggtcatgggctccacggatagatttgacaagagccctctgctggatggaggcagctcatcacaggagagtaccacagaatatacaggtgatggatctgtttgcaccagtgggcatcctgcttccaaaaaacatacagggaactggaaggcctcctccttaaccatagtctgttcattctgctgttatttggcctattcctcaattggaaaaaacctagtcagttatctcacaaaagtcttgcatgaaacaaatttggatgctgcaagacacgttgcaacttggcgaggtactagctatctcgctcctctggttggagcctttgttgctgattcatatctggggaagtaccggacagctttgatcgcctgcacaattttcattatgggaatgatgatgttgcttctatcagcagcacttccattaatctcagccggtcctcacgcttggactctttgggcagatcctgtctcttctcggtacattatgttcttggtcaggttgtacatggttggtttagggtacggtgcacagagcccttgcgtcacgtcttttggagccgatcaatttgatgacactgatgaagtggagaagaccagaaagagctctttctttaattggcactatttctcaatcaatgctggttcattgatcgctgggactgttattgtctgggttcaagaacatgaaggctggctctggggttttacaatttctacactatttgtgactttaggaataagtgttttttccttgggctccattgtgtatagatttcagaaacctggaggaagccctctagcaagaatatggcaggttgtcgttgcagcttctcggaacttcgataaagttttaccatgtgattcctcggctctttatgagttttcggggcaaggttcggcaattgaaggcagccggaaattggtacatacaagtggacttgagttctttgataaagctgcgattgtgacactacctgactgtgaatctcctggccaacttaatgaatggaagatttgtactgtcactcaggtagaggagttaaagattctgatcagaatgttcccaatttggtcagcaatggtattgtttgctgcagttcaggaacaaatgttttcaacatttgtagagcaagggatgacaatggagaaacacatcgggtctttcgaaatacccgctgcatcatttcaatctatagatacaattactgtcattatgctggttccaatttatgagaaagtccttgttccagtaataagaaaattcaccggcagagcgaatggcattacatcaccacagagaatagggattggtttatgtttctccatgttctcaatgctgttggcagcattggtggagagtaaccggttacagattgcacaggccgaaggtttggtgcacagcaaggtggttgttccgatgagcatcctgtggcaaggaccccagtacttcctgctaggcgtcgcggaggtgttctccaacattgggctaactgaatttttctacgacgaatctccagacgccatgagaagcttaggcatggcattctcgctccttaacatctcggttggaaattaccttagttcgtttatcctttcccttgtgcctgtattcacagccagaggaggcagcccagggtggatacctgataacttgaatgaaggacatttggatagattctacctgatgatggctgggctgagtttactgaatatatttgtgtttgcattctatgctaggaggtacaaatgtaagaaggcttcctga

SEQ ID NO: 289 - protein, 588 aa, Hordeum vulgare
MVMGSTDRFDKSPLLDGGSSSQESTTEYTGDGSVCTSGHPASKKHTGNWKASSLTIVCSFCCYLAYSSIGKNLVSYLTKVLHETNLDAARHVATWRGTSYLAPLVGAFVADSYLGKYRTALIACTIFIMGMMMLLLSAALPLISAGPHAWTLWADPVSSRYIMFLVRLYMVGLGYGAQSPCVTSFGADQFDDTDEVEKTRKSSFFNWHYFSINAGSLIAGTVIVWVQEHEGWLWGFTISTLFVTLGISVFSLGSIVYRFQKPGGSPLARIWQVVVAASRNFDKVLPCDSSALYEFSGQGSAIEGSRKLVHTSGLEFFDKAAIVTLPDCESPGQLNEWKICTVTQVEELKILIRMFPIWSAMVLFAAVQEQMFSTFVEQGMTMEKHIGSFEIPAASFQSIDTITVIMLVPIYEKVLVPVIRKFTGRANGITSPQRIGIGLCFSMFSMLLAALVESNRLQIAQAEGLVHSKVVVPMSILWQGPQYFLLGVAEVFSNIGLTEFFYDESPDAMRSLGMAFSLLNISVGNYLSSFILSLVPVFTARGGSPGWIPDNLNEGHLDRFYLMMAGLSLLNIFVFAFYARRYKCKKAS

SEQ ID NO: 290 - DNA, 1758 bp, Medicago truncatula
  CDS (1)..(1758)
atggcagatcaagaggaaactgaagaactcaagcttctcactgaatggaagagaaagaaaggtggatttagggcttctatgtttatttttgtattgtcagcattggacaacatgggttttgtggcaaacatggttagcttagttctatatttttatggagtgatgcactttgatataccaagttctgcaaatactctcacaaacttcatgggttcaactttcttgctttctctagttggtggcttcatctcagatacttacttaaatagattcaccacttgcttgctttttggatctctagaagttctggctttggcattggttacttttcaagctgcttcagatcatttacatccaaatgcatgtgggaaatcaagttgtgtgaaaggtggaatagaattcatgttttacacatcactgagtttgttggcattgggaataggaggggtaagaggatctatgactgcatttggtgctgaccaatttgaagaaaaggattcaaatgaggcaaaagcacttgcaagttttttcaattggcttttgcttagttcaacacttggagcaattacaggtgttactggtgttgtttgggttagtacacaaagagcttggcattggggatttttcataataactatagcttcttcaattggctttgtcacacttgctcttggtaagcctttctatagaatcaaaactccaggagatagccccacaatcagaattgctcaggttattgttgtggcatttaaaaaccgaaagctgtcactgccagagtcacacgaagaactatatgaaataagtgacaaagatggaacagtggagaaaattgttcacacaaaacaaatgaggtttctagataaagcagcaattccccaagaatacattaaacctcaaccatggaaagtgtgcacagtgacacaagttgaagaagtgaaaatcctaacaagaatgttaccaatagtagctagcacaatcataatgaacacttgtttagcacagcttcaaacattctcagtacagcaagggaatgtaatgaaccttaaacttggttcatttactgttccagcatcatcaattcctgtcatccctcttattttcataagcattttggttccaatttatgaacttttctttgttccatttgcaagaaaaatcactaaccacccttcaggaatcacacaactccaaagggtaggtgttggattagtactttcagttatatcaatgacagtggctgggatagtagaagtgaaaagaagagaccaaagtagaaaaaacccatctaacccaataagcctattttggctttcattccaatatggtatttttggtattgctgatatgttcacacttgtgggactcttggaatttttttatagggaatcaccttcaagtatgaaatcattgtcaacatctttcacatggttatcaatgtctattggttacttcctgagcactgtttttgtcaatttgattaatgttgttaccaaaaggattactcctagtaaacaaggttggttacatgggtttgatttgaatcaaagtaatttgaacctgttctattggttcctagctatacttagttgtcttaattttttcaactacctttattgggcctcacgctataagtacaaatctgaagaccaaaattcaagcccaataggtttgaagagtttgcatgaaatgcctctcaaaatgattggtgggacaaaacaaaattgggaaggtagcattggtggacacacacaagattga

SEQ ID NO: 291 - protein, 585 aa, Medicago truncatula
MADQEETEELKLLTEWKRKKGGFRASMFIFVLSALDNMGFVANMVSLVLYFYGVMHFDIPSSANTLTNFMGSTFLLSLVGGFISDTYLNRFTTCLLFGSLEVLALALVTFQAASDHLHPNACGKSSCVKGGIEFMFYTSLSLLALGIGGVRGSMTAFGADQFEEKDSNEAKALASFFNWLLLSSTLGAITGVTGVVWVSTQRAWHWGFFIITIASSIGFVTLALGKPFYRIKTPGDSPTIRIAQVIVVAFKNRKLSLPESHEELYEISDKDGTVEKIVHTKQMRFLDKAAIPQEYIKPQPWKVCTVTQVEEVKILTRMLPIVASTIIMNTCLAQLQTFSVQQGNVMNLKLGSFTVPASSIPVIPLIFISILVPIYELFFVPFARKITNHPSGITQLQRVGVGLVLSVISMTVAGIVEVKRRDQSRKNPSNPISLFWLSFQYGIFGIADMFTLVGLLEFFYRESPSSMKSLSTSFTWLSMSIGYFLSTVFVNLINVVTKRITPSKQGWLHGFDLNQSNLNLFYWFLAILSCLNFFNYLYWASRYKYKSEDQNSSPIGLKSLHEMPLKMIGGTKQNWEGSIGGHTQD

SEQ ID NO: 292 - DNA, 1914 bp, Medicago truncatula
  CDS (1)..(1914)
atggacaaggaacttcagctttgttctgttgatgctgctaatgaagaagaaatggtttctcaacaaccacaaagacgcaagggtggtcttatcaccatgccttttataattgggaatgaggcacttgctaggatggcaagtttgggactattaccaaacatgatattgtatttgatgggatcatacagacttcaccttggcatatctactcagatacttcttttatcctctgcagctagcaatttcacacctgtgattggtgcttttattgcagattcttttctgggtcgattcctaggtgttggaataggttcttctatcagtttcctgggaatgtcactgctgtggttaacagccatgatcccgtcggcacggcctcctgcttgcaaccatccatctgaaggttgtgaatcagcaacaccaggtcaattggcaatgttattctctgccctaattctgatagcaattggaaatggtggtatttcatgttctttagcatttggtgcagaccaagttaatagaaaagataaccctaataaccgcagggttttggaaatattcttcagttggtattatgctttcacaactatagctgtcataatagctctcactggaatagtatatatccaagatcatcttggttggaaagttggttttggtgttccagcaatactcatgcttatatccactgtcttattctttcttgcttctcctctttatgtgaaaattaaacaaaaaaccagcttattcactggttttgcacaagtatctgttgctgcctacaagaacagaaaacttccattgccacctaaaacctctcctgaattttaccatcaacaaaaagactcagaactcgttgttccaactgataaactaaggtttctaaataaagcttgtgttattaaggatcatgaacaagatatagcctcagatggttcagcgataaatcgttggagtctatgcacagtagatcaagttgaagaactaaaagccattattaaagttattccattgtggtcaacagcgatcacaatgtctattaacattggaggctcatttggattgctgcaagctaaatccttagacagacatatcatttcaagttcaaactttgaagtaccagcaggatctttttctgttatcttgatagttgcaatattaatatggataattatctatgatcgtgttcttattcctttagcatcaaagataagagggaagcccgtaattatcagcccaaagaaaagaatgggaattgggttgttttttaattttcttcacttgataactgcagcaatttttgagactgtaaggagaaaggaagcaatcaaagaaggatatttgaatgatactcatggagtgttgaaaatgtctgcaatgtggcttgcacctcaactttgtttggctggtatagcagaaatgttcaatgttattggccagaatgagttttattacaaagagtttccaaagagtatgtctagtgttgctgcttccctttctggattggcaatgggtgtaggaaacttggtatcctctttagtattgagcattatagaaagcactactccaagtggaggaaatgaagggtgggtttctgataatattaacaaaggtcatttcgacaagtattattgggttatagttggaattaatgctctaaatctattgtattacttagtatgcagttgggcttatggacctacagttgatgaagtatccaatgtgagtaaagaaaatggttccaaagtggaagaatcaactgaattcaagcatatgaatccacactttgatgacaaggttagtggtgaaactagttcaaaggagaaagagttaactgaattcaagaatggggcccaggttgagaaagtattcaagaatagtgaacaaagggacttgaaggaggaagatttgtga

SEQ ID NO: 293 - protein, 637 aa, Medicago truncatula
MDKELQLCSVDAANEEEMVSQQPQRRKGGLITMPFIIGNEALARMASLGLLPNMILYLMGSYRLHLGISTQILLLSSAASNFTPVIGAFIADSFLGRFLGVGIGSSISFLGMSLLWLTAMIPSARPPACNHPSEGCESATPGQLAMLFSALILIAIGNGGISCSLAFGADQVNRKDNPNNRRVLEIFFSWYYAFTTIAVIIALTGIVYIQDHLGWKVGFGVPAILMLISTVLFFLASPLYVKIKQKTSLFTGFAQVSVAAYKNRKLPLPPKTSPEFYHQQKDSELVVPTDKLRFLNKACVIKDHEQDIASDGSAINRWSLCTVDQVEELKAIIKVIPLWSTAITMSINIGGSFGLLQAKSLDRHIISSSNFEVPAGSFSVILIVAILIWIIIYDRVLIPLASKIRGKPVIISPKKRMGIGLFFNFLHLITAAIFETVRRKEAIKEGYLNDTHGVLKMSAMWLAPQLCLAGIAEMFNVIGQNEFYYKEFPKSMSSVAASLSGLAMGVGNLVSSLVLSIIESTTPSGGNEGWVSDNINKGHFDKYYWVIVGINALNLLYYLVCSWAYGPTVDEVSNVSKENGSKVEESTEFKHMNPHFDDKVSGETSSKEKELTEFKNGAQVEKVFKNSEQRDLKEEDL

SEQ ID NO: 294 - DNA, 1917 bp, Medicago truncatula
  CDS (1)..(1917)
atggacaaggaacttcaactttgttctgttgatgctgctgatgaagaagaaatggtttctcagcaaaaaccacaaagaagcaagggtggtcttgtcaccatgccttttatcattgggaatgaagcacttgctaagatggcaagtgtgggactattacccaacatgatattgtatttgatgggatcatacagacttcaccttggcatatctactcagatacttcttttatcctctgcagctagcaatttcacacctgtgattggtgcttttattgcagattcttatcttggtcgcttcttaggtgtcggaataggttcttctatcagtttcctgggaatgtcactgttgtggttaacagccatgatcccggcggcacggccttctgcttgcaaccatccatctgaaggttgtgaatcagcaacaccaggtcaattggcaatgttattctctgccttaattctgatagcaattggaaatggtggtattacatgttctttagcatttggtgcagaccaagttaatagaaaagataatcccaataactatagggttttggaaatattcttcagttggtattatgctttcataactatagctgtcataatagctctcaccggaatagtatatatccaagatcatcttggttggagaattggttttggtgttccagcagcactcatgcttatatccactgtcttgttctttcttgcttctccactttatgtgaaaattacacaaagaaccagcttgctcactggttttgcacaagtatctgttgctgcctataaaaacagaaaactttcattgccacctaaaacatctcctgaattttaccatcacaagaaagactcagaccttgttattccaactgataaactaaggtttctaaataaagcttgtgttattaaggatcatgaacaagatatagcctcagatggttcagcgataaatcgttggagtctatgcacagtagatcaagttgaagaactaaaagccattattaaagttattccattgtggtcaacagcgatcacaatgtctattaacattggaggctcatttggattgctgcaagctaaatccttagacagacatatcatttcaagttcaaactttgaagtaccagcaggatctttttctgttatcttgatagttgcaatattaatatggataattatctatgatcgtgttcttattcctttagcatcaaagataagagggaagcccgtaattatcagcccaaagaaaagaatgggaattgggttgttttttaattttcttcacttgataactgcagcaatttttgagactgtaaggagaaaggaagcaatcaaagaaggatatttgaatgatactcatggagtgttgaaaatgtctgcaatgtggcttgcacctcaactttgtttggctggtatagcagaaatgttcaatgttattggccagaatgagttttattacaaagagtttccaaagagtatgtctagtgttgctgcttccctttctggattggcaatgggtgtaggaaacttggtatcctctttagtattgagcattatagaaagcactactccaagtggaggaaatgaagggtgggtttctgataatattaacaaaggtcatttcgacaagtattattgggttatagttggaattaatgctctaaatctattgtattacttagtatgcagttgggcttatggacctacagttgatgaagtatccaatgtgagtaaagaaaatggttccaaagtggaagaatcaactgaattcaagcatatgaatccacactttgatgacaaggttagtggtgaaactagttcaaaggagaaagagttaactgaattcaagaatggggcccaggttgagaaagtattcaagaatagtgaacaaagggacttgaaggaggaagatttgtga

SEQ ID NO: 295 - protein, 638 aa, Medicago truncatula
MDKELQLCSVDAADEEEMVSQQKPQRSKGGLVTMPFIIGNEALAKMASVGLLPNMILYLMGSYRLHLGISTQILLLSSAASNFTPVIGAFIADSYLGRFLGVGIGSSISFLGMSLLWLTAMIPAARPSACNHPSEGCESATPGQLAMLFSALILIAIGNGGITCSLAFGADQVNRKDNPNNYRVLEIFFSWYYAFITIAVIIALTGIVYIQDHLGWRIGFGVPAALMLISTVLFFLASPLYVKITQRTSLLTGFAQVSVAAYKNRKLSLPPKTSPEFYHHKKDSDLVIPTDKLRFLNKACVIKDHEQDIASDGSAINRWSLCTVDQVEELKAIIKVIPLWSTAITMSINIGGSFGLLQAKSLDRHIISSSNFEVPAGSFSVILIVAILIWIIIYDRVLIPLASKIRGKPVIISPKKRMGIGLFFNFLHLITAAIFETVRRKEAIKEGYLNDTHGVLKMSAMWLAPQLCLAGIAEMFNVIGQNEFYYKEFPKSMSSVAASLSGLAMGVGNLVSSLVLSIIESTTPSGGNEGWVSDNINKGHFDKYYWVIVGINALNLLYYLVCSWAYGPTVDEVSNVSKENGSKVEESTEFKHMNPHFDDKVSGETSSKEKELTEFKNGAQVEKVFKNSEQRDLKEEDL

SEQ ID NO: 296 - DNA, 1770 bp, Medicago truncatula
  CDS (1)..(1770)
atggtgaacaaggagctggaggtttgcacattggatggatctattgatagccacggtcatcctgctgttcgagagagaactggaacttggtttgcagggattttgattttagtgaaccaagggttggcaactctagcattttttggtgtgggagtgaatttggtactatttttaacaagagttatgggtcaagacaatgctgatgctgcaaacaatgtgagcaagtggacagggacagtttacatcttttctcttcttggagctttcctcagtgactcttactggggaagatacatcacttgtgccattttccaagtcatctttgttgttggtttggtggcattatcattgacatcttacatcttcctattgaaacctaatggttgtgggtctaaagaattaccttgtggaacacattcatcatatgaaactactttattctatgtatccatttatctagtagccttaggaaatggaggatatcaacctaccattgctacatttggtgctgatcaatttgatgaaagtgatcctagtgaacaacactcaaaaatagcattttttagctatttttatttggctttgaacattggatcactcttctcaaacaccatattggactattttgaagatgatggactttggactttgggattttgtgtctcagctggttctgctgccctagcattggttttgtttctttgtggcacatcaaaatatagatactttaaacctgttggaaaccctcttcctaggttttgtcaagtttttgttgcagcaataagaaaatggaaggtccaaatgttcgacggtgaagataaacttcatgaggttgaagattgtttatccaatggagggagaaaaatgtaccacacacaaggctttaggtttttagataaagcagcatttattacaccaaaagatttgaagcaaatggaagaaaataaatgcagtccatggtttctatcaactgtgacacaagtagaagaagtgaaatgcatattaagattactcccaatttggttatgcactatattattctctgttgtcttcagtcaaatggcatcactctttgtggaacaaggtgctgcaatggagactaaaatttccacttttcacatccctcctgcaagtatgtcaagctttgacattctcagtgtagtttccttcatcttcatctatcggagaattctcgaccctcttgttgctagatttacaaagaaatccaaaggtatcaccgagcttcaaaggatgggaataggtctagtattagcaatcatagcaatggtttcagcaggattagtagagattttccggctaaagtatgcgataaaagaagaaaaaaattgtagccattgcgaagggacgagttcattatcgatattttggcaagtaccgcaatatgtactaataggagcatcagaagttttcatgtatgttggtcaattggagtttttcaattcacaggcacctgatggattgaaaagctttggaagtgcactttgtatgacttcaatatcattaggaaactatgttagtagcttgcttgttgcaattgtgatgaagatatctactagaaatgaaggcatgcttggttggattccagggaacttaaatatgggacatttggataggttttacttcctcttagcagcactcactgcagctgaccttctagtgtatattgcaatggctaggtggtataaatatgttaaatttcatggaaacaatattgaacaaggtaacaatattgaggaaaatgttgtgtaa

SEQ ID NO: 297 - protein, 589 aa, Medicago truncatula
MVNKELEVCTLDGSIDSHGHPAVRERTGTWFAGILILVNQGLATLAFFGVGVNLVLFLTRVMGQDNADAANNVSKWTGTVYIFSLLGAFLSDSYWGRYITCAIFQVIFVVGLVALSLTSYIFLLKPNGCGSKELPCGTHSSYETTLFYVSIYLVALGNGGYQPTIATFGADQFDESDPSEQHSKIAFFSYFYLALNIGSLFSNTILDYFEDDGLWTLGFCVSAGSAALALVLFLCGTSKYRYFKPVGNPLPRFCQVFVAAIRKWKVQMFDGEDKLHEVEDCLSNGGRKMYHTQGFRFLDKAAFITPKDLKQMEENKCSPWFLSTVTQVEEVKCILRLLPIWLCTILFSVVFSQMASLFVEQGAAMETKISTFHIPPASMSSFDILSVVSFIFIYRRILDPLVARFTKKSKGITELQRMGIGLVLAIIAMVSAGLVEIFRLKYAIKEEKNCSHCEGTSSLSIFWQVPQYVLIGASEVFMYVGQLEFFNSQAPDGLKSFGSALCMTSISLGNYVSSLLVAIVMKISTRNEGMLGWIPGNLNMGHLDRFYFLLAALTAADLLVYIAMARWYKYVKFHGNNIEQGNNIEENVV

SEQ ID NO: 298 - DNA, 2997 bp, Oryza sativa
  CDS (1091)..(2803)
gagtactgctatagtgtgagctacgattggggagcggcaaccacaccaaccccatctccatctccctcccagaccgacctcccaccgccgcttttgcccttccctctccaatcgtccatcgctcactctcctcaggtctcatctctctctctctctctctccacctggtacttttgctggaatcgatggcttacatatgtttttagaggattttagggatagatataagcatgcttgttgcaggccaaatctttcttcatttttggaattaatactgcacctgaactttttttggataaaaaagaaagtgtatcagctttgaatgaagcctactagttctttatgagtagtgtgtggtcattttcccctggttaaattgtgggatggatgtttgcttcaaagaaataaaagaaattgtgggatggacctgatggttcaaggctaattttgttttgacacttcatttcttaggtttttggtgtgtttgtgttcaagattgaataggacaagacataggggttagctctcaatttaaatgcccaagttaaaaagattgtaataattgtcaaaaaaatttgcatggaatgcttccttctctagaaagtaggaagtctgacggtctgaccccccaaaaaaaggtcagtttgtcctcttctgtttttatgataattactttcctaatttcccagctgacagaagggtgttgcttgcaagaaatagttgtttacagaattatgtagtcaatagagttcatatataacttccagtaccaaaattgcgtgattgtgctaatcaaaatgcagaattggatatgagtaatcaatcagaaaaagtgcgagtgatatgctagtggcctaatgtcactgaattttcagaagaccaagacagcacaaatgggtgttgtcgggtatgtgatgcaatttgttagataatttcttatttatcttctaacaatttcttatctcatcattgcccacatagatggcttacgaaaaattccttaggtgcaagattatactgaattaattgcaagtagcttagagtcgtcggttttcttccaacaaaattgctgaagaagccagaggctcaaatggaggcatctgatgaggacaggccactgattcatcacctgcctccacaggaacaatgttcaaaatacacatgcgatggaacggttaatattgacagtaagcccgcgctgaagcagagtacggggaattggagagcatgtttcttcattttaggtgttgaattcactgaatgcatctgcttctacggggtttcaaagaacttagtcacatacctcacaagtgtgctccatgaaagcaacgtcaatgctgcacaaagtgtgtcgatctggatcggcagttgcttcttcacaccactcattggagccttcttggctgacacatattggggaagatactggacagtagtaatgtccatccttgttatcatccttggaatgatcgttctgacggtttcggcatcaccattgttcctgaatgcttctttctacaatgggggtatttctcgtctaactgtctacctagggctctacctttttgcccttggaactggaggtataaagccaaacattccggccttcggagctgatcaattcgacggcgccgacccggtggagcgggtgacaaagggctcattcttcaactggtactacttctcaatcaacgtgggctcgctgctgtcgtccaccgtggttgtctgggttcaggacaacatagggtggagtgtcggttttgctggcccaatgctactcttggggttcggcctcgccatgttcatcgccggtaggagggcgtacaggtacaagaaactgggagggagccctctgacaagggtctttcaggtgctggttgcagctgtaagaaatcataggctgaacttgcctgatgatagctcactcctgcatgagcttccaggagtgactgaaggtgactacagaactcaacatacctatcaattcaggtttttggacaaggctgccatcttgtcggacaagaactgcgcgccggcggcgccgtcgagcccatggaggctgtgcaccgtgtcgcaggtggaggagctcaagatgctgctgcggacgttcccggtctgggcgtcgctggtcggcttcttcatggtgaccgcgcagatgacgtcgaccctgatcgagcagggcgtcgccatggacggccgcgtcggccgcttcaccgtgccgccggcctcgctcgccaccttcgacgtcgtcgccgtcctcgccctgatcccggtctacgacgccgcgctggtgccgctggcgcggcgcgtcaccggcagggacaggggcgtctcgcacatgcagcgcatcggcgtcggcctcgcgctgtccgcggtggccatggcgtactcggcgctggtcgaggcgcggcgtctggcgatggcggcggcggcggcggggacgcggatgagcatcgcgtggcaggtgccgtccttcttcgtgctgggcgccggggaggtgttcgccgtcatcggcatgctggagttctgctacgagcagtcgccggcgtcgatgaagagcctcggcacggcgctcgtgcagctcgccgtcgccgtcgccaactacctcaactccggcatgctcagggtggtggcggcggccacggcgcgcggcggcggcgccgggtggatcccggacaagctcgacgagggccatctggactacttcttctggatgatggctgcactcagcgtgctcaacctgctgcagttcctgcactgctcaatcagattcagaggcaacaacacactgtcatcatcgtgacgtactccattcttccgtctcaagggctcatgccctgcgtatatactcctgcaaatgtgttctcatttcttgttctgtctccaggattgagaaaacggagtaacaggaagccccggattttattttaacagaaatgtaagtgcaaaacaaataattttataatataagagtaacacaagaatgatcgattaact

SEQ ID NO: 299 - protein, 570 aa, Oryza sativa
MEASDEDRPLIHHLPPQEQCSKYTCDGTVNIDSKPALKQSTGNWRACFFILGVEFTECICFYGVSKNLVTYLTSVLHESNVNAAQSVSIWIGSCFFTPLIGAFLADTYWGRYWTVVMSILVIILGMIVLTVSASPLFLNASFYNGGISRLTVYLGLYLFALGTGGIKPNIPAFGADQFDGADPVERVTKGSFFNWYYFSINVGSLLSSTVVVWVQDNIGWSVGFAGPMLLLGFGLAMFIAGRRAYRYKKLGGSPLTRVFQVLVAAVRNHRLNLPDDSSLLHELPGVTEGDYRTQHTYQFRFLDKAAILSDKNCAPAAPSSPWRLCTVSQVEELKMLLRTFPVWASLVGFFMVTAQMTSTLIEQGVAMDGRVGRFTVPPASLATFDVVAVLALIPVYDAALVPLARRVTGRDRGVSHMQRIGVGLALSAVAMAYSALVEARRLAMAAAAAGTRMSIAWQVPSFFVLGAGEVFAVIGMLEFCYEQSPASMKSLGTALVQLAVAVANYLNSGMLRVVAAATARGGGAGWIPDKLDEGHLDYFFWMMAALSVLNLLQFLHCSIRFRGNNTLSSS

SEQ ID NO: 300 - DNA, 1770 bp, Brassica napus; identical to SEQ ID NO: 51
  CDS (1)..(1770)

SEQ ID NO: 301 - protein, 589 aa, Brassica napus; identical to SEQ ID NO: 52

SEQ ID NO: 302 - DNA, 1764 bp, Oryza sativa
  CDS (1)..(1764)
atgcgcggcggcggcggcggcggcggcggcggcggcgaggaggccggccagaagctgaagagcatggacgtcgacaagctggagaacggcggcgacaagcccgccctcaagtaccacggctggagggccatgcccttcatcatagggaacgagacgttcgagaagctggggacgctggggacgtcggcgaacctgctggtgtacctgacgcaggtgttccacatgcggagcgtggacgcggcgacgctgctcaacggcctcaacggcaccaccagcctcgcccccatcatcggcgccttcctctccgacgcctacctcggccgctacctcgccctcgccatcgcctccgtcgcctccctcatcggcatgttcttgctgacgatgacggccgccgcggacgggctgcacccggcggagtgcggggtgggggagacgtgctcgaaggcgacgtcggggcagttcgcggtgctgttcatgtcgttcgcgttcctggtgctggggtcggcggggatccggccgtgcagcatgccgttcggcgccgaccagttcgacccccacacggagtccggcaagcgcggcatcaacagcttcttcaactggtactacttcaccttcacctccgccatgctcgtctccgccaccgtcatcatctacgtccagagcaacgtcagctggcccatcggcctcggcatccccaccgcgctcatgctcctcgcctgcgtcctcttcttcatgggcaccaggctctacgtccgcgtcacccccgagggctcccccttcaccagcatcgtccaggtgttcgccgccgcggcgaggaagcggtcgctcaagcagcccaaggaccccaagcaggacctgttcgacccgccgcacaccagcgccatcgtcaccaagctggcgcacacggaccagttccggtgcctcgacaaggcggccatcgtgtccggccccgacgacgtgcgcgccgggggcgccgcgccgtcgaacccgtggaggctgtgcagcgtgcagcaggtggaggaggtgaagtgcctcatccgcatcgtgcccgtctggtccacggggatcatctactacgtcgccgtcgtgcagcagtcgacctacgtggtgttgtccgcgctgcagtccgaccgacacctcggccggagcttccagatccccgcggcgtcgttcacggtgttcgccatgctggcgcagacgctgtggatccccatctacgaccgcctcctcgtgccgcgcctccgcagggtcacgggcaaggacgagggcctcaccctcctgcagcggcaggggatcgggatcgcgctgtcgacggtggcgatggtgatgtcggccgtggtggaggaccggaggcggcacatcgcgctgacgcagccgacgctggggacgaccatcaccgggggcgccatctcggccatgtccagcctgtggatggtgccgcagctcatggtgctggggctctcggaggcgttcaacctcatcagccagatcgagttctactacaaggagatcccggagcacatgcggagcgtggccggcgcgctcgccttctgcaacctggcgctggggaactacctcagtgggttcctcgtcaccatcgtgcaccggaccaccggcgccgggagcaactggctggcgcaggacctcaacaaggggaggctcgacctcttctactggatgatcgccggcatcggcatcttcaacatcatctacttcatgatctgcgccaagtggtacaggttcaagggggcagccgccaactga

SEQ ID NO: 303 - protein, 587 aa, Oryza sativa
MRGGGGGGGGGGEEAGQKLKSMDVDKLENGGDKPALKYHGWRAMPFIIGNETFEKLGTLGTSANLLVYLTQVFHMRSVDAATLLNGLNGTTSLAPIIGAFLSDAYLGRYLALAIASVASLIGMFLLTMTAAADGLHPAECGVGETCSKATSGQFAVLFMSFAFLVLGSAGIRPCSMPFGADQFDPHTESGKRGINSFFNWYYFTFTSAMLVSATVIIYVQSNVSWPIGLGIPTALMLLACVLFFMGTRLYVRVTPEGSPFTSIVQVFAAAARKRSLKQPKDPKQDLFDPPHTSAIVTKLAHTDQFRCLDKAAIVSGPDDVRAGGAAPSNPWRLCSVQQVEEVKCLIRIVPVWSTGIIYYVAVVQQSTYVVLSALQSDRHLGRSFQIPAASFTVFAMLAQTLWIPIYDRLLVPRLRRVTGKDEGLTLLQRQGIGIALSTVAMVMSAVVEDRRRHIALTQPTLGTTITGGAISAMSSLWMVPQLMVLGLSEAFNLISQIEFYYKEIPEHMRSVAGALAFCNLALGNYLSGFLVTIVHRTTGAGSNWLAQDLNKGRLDLFYWMIAGIGIFNIIYFMICAKWYRFKGAAAN

SEQ ID NO: 304 - DNA, 1761 bp, Triticum aestivum
  CDS (1)..(1761)
atggactccacggatcagtttgacaacagccctctgctagacggagacggctcatcacaagagaatacaacagaatatacaggtgatgggtctgtttgcatcagtgggcatcctgcttccagaaaacatacagggaattggaaggcctccttcttaatcatagtctgttcattctgttgttatcttgcgtattcttccattggaaaaaacctagtcagttatctcacaaaagtcctacatgaaacaaatttggatgctgcaagacatgttgcaacttggcaaggtactagctatctcgcgcctctggttggagccttcgttgccgattcatatctggggaagtaccggacagctttgatcgcctgcaagattttcattattggaatgatgatgttgcttctatcagcagcacttcaattaatctcagccggtcctcacgcttggactgtttgggtacatctagtctcttctcagtacaccatattcttgattggtttgtacatggtgggtctagggtatggtgcacagcgcccttgcgtcacgtcttttggagccgatcaattcgatgacaccgattatgtggagaaaaccagaaagagctccttcttcaattggcactatttcgcaatcaatgctggttcattgattgctgggactgttattgtctgggttcaagaacatgaaggctggctctggggttttacaatttctacattgtttgtgactttaggtgtatgtatttttttcttgggctccatcgtgtatagatttcagaagcctagaggaagccctctgacaagactatgccaggttgtcattgcagctactcggaactttgataaggttttgccatgtgattcctcagctctttatgagtttatggggcaaggctcggcaatcgaaggcagacggaaattggagcatacaactggactcgggttctttgataaagctgcaattgtgacattacctgactgtgaatctcctggccaacataataaatggaagatttgcactgtcactcaggttgaggagttaaagattctgatcaggatgtttccaatttggtcggcaatgattttgtttgctgcagttcaggaacaaatgtcctcaacatttgtagagcaagggatggcaatggataaacacatcgggtctttcgaaataccttctgcatccttccagtgtgtagatacaattactgtcattgtactggttccaatttatgagagactcattgttccagtaattagaaaatttactggcagagcgaatggcattacatcaccacagcgaatagggattggtttatgtttctcgatgttctcaatggtgtcagcagcattggtggagggtaaccggctacagattgcacaggccgaaggtttggtgcaccgcaaggtggctgttccgatgagcatcatgtggcaaggaccccagtacttcctgctaggcgtcgccgaggtgttctccaatattgggctaactgaggctttctatgatgaatctccagatggcatgcgaagcttatgtatggcattctcgcttgttaacatgtcggctggaaattaccttagttcacttatcctttcccttgtgccagtattcacagccagaggaggcagcccagggtggatacctgataacttgaatgaagggcatttggatagattctacctgatgatggctgggctgagtttttttaatatagtagtctttgtattctgtgctatgaggtacaaatgtaagaaggcttcatga

SEQ ID NO: 305 - protein, 586 aa, Triticum aestivum
MDSTDQFDNSPLLDGDGSSQENTTEYTGDGSVCISGHPASRKHTGNWKASFLIIVCSFCCYLAYSSIGKNLVSYLTKVLHETNLDAARHVATWQGTSYLAPLVGAFVADSYLGKYRTALIACKIFIIGMMMLLLSAALQLISAGPHAWTVWVHLVSSQYTIFLIGLYMVGLGYGAQRPCVTSFGADQFDDTDYVEKTRKSSFFNWHYFAINAGSLIAGTVIVWVQEHEGWLWGFTISTLFVTLGVCIFFLGSIVYRFQKPRGSPLTRLCQVVIAATRNFDKVLPCDSSALYEFMGQGSAIEGRRKLEHTTGLGFFDKAAIVTLPDCESPGQHNKWKICTVTQVEELKILIRMFPIWSAMILFAAVQEQMSSTFVEQGMAMDKHIGSFEIPSASFQCVDTITVIVLVPIYERLIVPVIRKFTGRANGITSPQRIGIGLCFSMFSMVSAALVEGNRLQIAQAEGLVHRKVAVPMSIMWQGPQYFLLGVAEVFSNIGLTEAFYDESPDGMRSLCMAFSLVNMSAGNYLSSLILSLVPVFTARGGSPGWIPDNLNEGHLDRFYLMMAGLSFFNIVVFVFCAMRYKCKKAS

SEQ ID NO: 306 - DNA, 1761 bp, Triticum aestivum
  CDS (1)..(1761)
atggactccacggatcgatttgacaagagccctctgctggacggaggcagctcatcacaggagaattccacggaatatacaggtgatggatctgtttgtaccagtggtcatcctgcttccagaaaacatacagggaactggaaggtctcctccttaaccatagtctgttcattctgctgctatctggcctattcttcaattggaaaaaacctagtcagttatctcacaaaagtcctagatgaaacaaatctggatgctgcaagacatgttgcaacttggcaaggtactagctatctcgcgcctctggttggagccttcgttgctgattcatacctggggaagtaccggacagctttgatcagctgcacaattttcattatgggaatgatgatgctgcttctatcagcagcacttccattaatctcagccggtcctcatgcttggactctttgggcagatcctatctcttctcggtacattatattcttggttgggttgtacatggttggtttagggtacggtgcacagtgcccttgcgtcacatcttttggagccgatcaatttgatgacaccaatgagatggagaagaccagaaagagctctttctttaattggcactatttctcaatcaatgctggttcattgatcgctgggactgttattgtctgggttcaagaacatgaaggctggctctggggctttacaatttctacactatttgtgactttaggtataagtgtgtttttcttgggctccattgtgtatagatttcagaaacctggaggaagccctctagcaagaatatggcaggttgttgttgcagcttctcggaacttcgataaagttttgccatgtgattcctcagctctttatgagttttcggggcaaggatcggcaatcgaaggcagccggaaatcggaacatacaagtggacttgagttctttgataaagctgcaattctgacactacctgactgtgaatctcctggccaacttaataagtggaagatttgtaccgtcactcaggtagaggagttaaagattctgatcagaatgttcccaatttggtcagcaatggtattgtttgctgcagttcaggaacaaatgttttcaacatttgtagagcaagggatgacaatggagaaacacgtcgggtctttcgaaatacccactgcatcctttcaatccatagatacacttactgtcattatgctggttccaatttatgagagagtccttgttccagtaataagaaaattcaccggcagagcgaatggcatatcgtcgccacagcgaatagggattggtttatgtttctccatgctctcaatggtgttagcagcattggtggagagtaaccggttacagattgcacagtccgaaggtttggtgcacagcaaggtgactgttccgatgagcatcctgtggcaaggaccccagtacttcctgctaggcgtcgccgaggtgttctccaacattgggctaactgaatttttctgtgatgagtctccagacgccatgagaagtttaggcatggcattctcgcttcttaacatctcggctggaaattaccttagttcgtttatcctttcccttgtgccggtattcacagccagaggaggcagcccagggtggatacctgataacttgaatgaagggcatctggacagattctacctgatgatggctgggctgagtttactgaatatatttgtctttgtattctatgctaggaggtacaaatgtaagaaggcttcctga

SEQ ID NO: 307 - protein, 586 aa, Triticum aestivum
MDSTDRFDKSPLLDGGSSSQENSTEYTGDGSVCTSGHPASRKHTGNWKVSSLTIVCSFCCYLAYSSIGKNLVSYLTKVLDETNLDAARHVATWQGTSYLAPLVGAFVADSYLGKYRTALISCTIFIMGMMMLLLSAALPLISAGPHAWTLWADPISSRYIIFLVGLYMVGLGYGAQCPCVTSFGADQFDDTNEMEKTRKSSFFNWHYFSINAGSLIAGTVIVWVQEHEGWLWGFTISTLFVTLGISVFFLGSIVYRFQKPGGSPLARIWQVVVAASRNFDKVLPCDSSALYEFSGQGSAIEGSRKSEHTSGLEFFDKAAILTLPDCESPGQLNKWKICTVTQVEELKILIRMFPIWSAMVLFAAVQEQMFSTFVEQGMTMEKHVGSFEIPTASFQSIDTLTVIMLVPIYERVLVPVIRKFTGRANGISSPQRIGIGLCFSMLSMVLAALVESNRLQIAQSEGLVHSKVTVPMSILWQGPQYFLLGVAEVFSNIGLTEFFCDESPDAMRSLGMAFSLLNISAGNYLSSFILSLVPVFTARGGSPGWIPDNLNEGHLDRFYLMMAGLSLLNIFVFVFYARRYKCKKAS

SEQ ID NO: 308 - DNA, 1704 bp, Solanum demissum
  CDS (1)..(1704)
atggaaagttcagtaagaggtgttgatgaagcagcaataatgaagtcttctacgcgtcgaaagaatggcggatggataaccttccccttcattatagtgtcagcaactatggcgggcttatcgcttgcatctggagggtggacgagcaacctgattgtttatttgatagatgaattcaacatgaagagcatcaaaacagctaaagtttacaatgtgatcaatggatgcaccacacttttccccattgttggtggaatcctagctgactcttatcttggcagtttttctgtcatttggttttcatctcttatctctgctttgggtatattgcttctattgtttacatcagcaattgatgtactaagacctccaccatgtgatgatggatccagtctctgcacgagtccgtcaacacaccaatacgcggtattatatgtggctctggcattagcatcactaggtgtcgcgggtacacgttttataatagcacccatgggagctaatcaatttgataaaccaaaacatcaagcaattttcttcaattggtacatattcgccttttacatgtcctttgccattagcacgacagttattgtttatgtagaggacaatgtcagttggtcatggggttatggtatctctatggcatttaacatccttggcttggcaatgttcctcattgggaaacgtttttattgcgatgttaaggaacaaggtggtagccctttcgtcaacttagctcgtgttatagtcgttgccattcagaaatggagagtccctctttcagaacaaactcaacactactatcatgatccaagtgacactactaccacactaacaataactcaaattcctacgaaatccttcaagttcttgaattgtgctgcgtttattactgagggagacactaaaccagacggctcgattagtaacccctggagactatgcacagtgcagcaagtagaagatttgaaaagcttgatcaagcttttccctctatgggctagtggttttcttatatcgactcaattagtcatacaagcgagtctgttaatacttcaggctctcaaaatggatcgccatatgggacctcatttcgagatcccagctggttctatgttggtcttcattttgctattcacatgtatagccatattcatcattgacaggtttttgtatccttttctagctaagtacactaccttttctcttacccctcttcaacgtatcggaataggccatgttataactattattagcatggctgtttccgccctggttgagtctagacgattgaggatcgttaggactcacaaactccaaggccaaaacaatgacattgttccaatgtccgtgttttggctagtgccacaactagctcttaatggaattggagaaggatttcattttccaggacatatcgcgttttattatcaagaatttccaacatccttgaagagtacatcgactgcaatggttgcattgtttattggtatcgcgcactatttggggaatactttgattgatcttgttcaacgattatcaggatggttaccagacaatatcaacaaggggagaactgataatgtcttctggctttgttgcatcctgggatcagctaacttcatgtattacgtcgtgtgtgcttcattgtacaagtataagaatgtcgataacaaatcaaatatcgcgcctagtaaatga

SEQ ID NO: 309 - protein, 567 aa, Solanum demissum
MESSVRGVDEAAIMKSSTRRKNGGWITFPFIIVSATMAGLSLASGGWTSNLIVYLIDEFNMKSIKTAKVYNVINGCTTLFPIVGGILADSYLGSFSVIWFSSLISALGILLLLFTSAIDVLRPPPCDDGSSLCTSPSTHQYAVLYVALALASLGVAGTRFIIAPMGANQFDKPKHQAIFFNWYIFAFYMSFAISTTVIVYVEDNVSWSWGYGISMAFNILGLAMFLIGKRFYCDVKEQGGSPFVNLARVIVVAIQKWRVPLSEQTQHYYHDPSDTTTTLTITQIPTKSFKFLNCAAFITEGDTKPDGSISNPWRLCTVQQVEDLKSLIKLFPLWASGFLISTQLVIQASLLILQALKMDRHMGPHFEIPAGSMLVFILLFTCIAIFIIDRFLYPFLAKYTTFSLTPLQRIGIGHVITIISMAVSALVESRRLRIVRTHKLQGQNNDIVPMSVFWLVPQLALNGIGEGFHFPGHIAFYYQEFPTSLKSTSTAMVALFIGIAHYLGNTLIDLVQRLSGWLPDNINKGRTDNVFWLCCILGSANFMYYVVCASLYKYKNVDNKSNIAPSK

SEQ ID NO: 310 - DNA, 1755 bp, Vicia faba
  CDS (1)..(1755)
  misc_feature (1321)..(1321): y is t or c
atgggttccgtagaggacgattcttcgcgtttggaagaagcgcttattcaggatgaagaaagtaagctatacacaggagatggctcggtcgactttaaagggaggcctgtgcttaagaagaatactggcaattggaaagcttgcccatttatcctaggcaatgagtgctgtgaacgtttggcatactatggcattgcaacaaatcttgttaaacctatcttactcgccaagctacatgaaggaaatgtctctgcggcaagaaacgtcaccacttggcaaggcacttgttaccttgcacctctcattggagcagttctagcagattcttactggggacgatactggacaattgccattttctccatgatttatttcattggaatgggtacgttgacactttctgcttctattccagcattgaagcctgctgaatgtctgggtgctgtatgccctccagctactcctgcacaatatgctgtgttcttcattggtctctatctgattgcgcttgggactggtggtattaaaccatgtgtgtcttcttttggggcagaccagtttgatgatactgattcgcgggaaagggttaagaagggatcgtttttcaactggttttacttttctatcaacataggagccctcatatcaagcagttttattgtgtggattcaagaaaatgcaggctggggtcttggatttggaattcctgctttatttatgggattagctatcggaagcttctttttaggcacacccctatataggtttcaaaaaccaggaggaagccctcttacaagaatgtgccaggttgtggctgcatcttttcggaaacggaatcttactgttcctgaagatagtagtctcctctatgagacaccagacaagagctctgcaattgaaggaagtcggaaactacagcatagcgatgaattaaggtgtcttgacagagcagctgtaatctctgatgatgaaaggaaaagaggtgactattctaatttgtggagactttgcactgtgacacaggtggaggaattaaaaatcttgatccgcatgtttccagtttgggctactgggatagttttttctgctgtctatgctcagatgtcaacaatgtttgtggaacaaggaactatgatggacactagcgttggttctttcaaaataccagcagcttccctctcaacttttgatgtaatcagtgttattttctgggtccctgtctatgacaggtttatagttcccattgcaaggaaatttactggcaaagaaaggggattttcagagttgcaaagaatgggaattggtctttttatttcagtcytgtgcatgtcagctgctgctattgtcgagattaagcgtctgcagcttgccaaagagcttgaccttgttgataaagctgtccccgtaccacttactatatttttgcaaatcccccagtatttcttattgggagcagcagaagtattcacatttgtggggcagcttgagttcttctatgaccaatctccagatgctatgcgaagtttatgcagtgctctgtcacttctgactacttcgctcggaaattacttgagttcattcattctcactgtggtactttacttcactacacgagggggaaatcctggatggattccggataacttgaacaaaggtcatctcgattacttttctggcttagctggactcagcttcttaaatatgtttctgtacatagttgctgccaaaagatacaagtcaaagaaggcttcgtaa

SEQ ID NO: 311 - protein, 584 aa, Vicia faba
MGSVEDDSSRLEEALIQDEESKLYTGDGSVDFKGRPVLKKNTGNWKACPFILGNECCERLAYYGIATNLVKPILLAKLHEGNVSAARNVTTWQGTCYLAPLIGAVLADSYWGRYWTIAIFSMIYFIGMGTLTLSASIPALKPAECLGAVCPPATPAQYAVFFIGLYLIALGTGGIKPCVSSFGADQFDDTDSRERVKKGSFFNWFYFSINIGALISSSFIVWIQENAGWGLGFGIPALFMGLAIGSFFLGTPLYRFQKPGGSPLTRMCQVVAASFRKRNLTVPEDSSLLYETPDKSSAIEGSRKLQHSDELRCLDRAAVISDDERKRGDYSNLWRLCTVTQVEELKILIRMFPVWATGIVFSAVYAQMSTMFVEQGTMMDTSVGSFKIPAASLSTFDVISVIFWVPVYDRFIVPIARKFTGKERGFSELQRMGIGLFISVLCMSAAAIVEIKRLQLAKELDLVDKAVPVPLTIFLQIPQYFLLGAAEVFTFVGQLEFFYDQSPDAMRSLCSALSLLTTSLGNYLSSFILTVVLYFTTRGGNPGWIPDNLNKGHLDYFSGLAGLSFLNMFLYIVAAKRYKSKKAS

SEQ ID NO: 312 - DNA, 1791 bp, Prunus persica
  CDS (1)..(1791)
atgagtaattgtaccctcccagaaacacaagagaaattgaccctcccggatgcctgggacttcaagggccgccccgctgagcggtccaagactggcggctggacggcggccgccatgattctaggtggagaggcttgtgagaggctaacaacgctaggaattgctgttaacttggtgacttatttgactggaaccatgcacttgggcaatgctacctctgctaataccgtcaccaattttcttggtacttccttcatgctctgcttgctcggcggttttgtggccgatacctttcttggcagatacctaaccatcgctatatttgccaccttccaagcaatgggtgtgacaatattgacaatctcaaccacaatccccagcctccgacccccaaaatgcacctccgacaccagcacaccttgcatcccggcaagcggcaagcaactcatggttctctacatagccctctacctgacagccctgggcaccggcggcctaaaatcgagcgtttcaggcttcggctcagaccaatttgatgagtcagacaaacaagaaagaagacaaatgacaaacttcttcaactggttcttcttcttcataagcataggctcacttgccgcagtcaccgttcttgtctacatacaagacaacttggggaggcaatggggctatggcatatgtgtctgtgcaattgtgcttggcctcattgtgttcttgtcaggaacaagacggtaccgtttcaagaaactggtgggcagccctttgactcagatatcgggggtgtgtgtggcggcgtggaggaagaggaacatggagttgccctccgacatgtcgtttttgtacaacgttgatgacattgatgatggactcaagaagaagaagaagcagaagttgcctcatagcaagcagttccgtttcttggataaggcagcaatcaaggaacccaaaacgacaagcggtacagccatgatcataaacaagtggagcttatcaaccctaaccgatgttgaggaagtaaaattgattatcagaatgttgccaatttgggccaccacaatcatgttttggactgtctacgctcaaatgaccacattctcagtgtcacaagcaacctccatggaccgccacattggaaaatcatttcaaatcccacctgcctctctcacagctttctttgtaggcagcattctcttgacagtcccagtatacgaccggctcattgtccccatggcaagaaaagccctagaaaacccacaaggtctaaccccattgcaacgcatgggggttggcctagttttctcaatctttgcaatggtagcagcagctctcacagaagtcaagcgcttgaacatcgcacgatcacatggcttgaccgacaatccaacggctgagatcccactgagtgttttctggctggtcccacagtttttctttgtggggtccggggaggccttcacatatattgggcagcttgacttcttcctcagggagtgccctaaggggatgaagaccatgagcacaggcttgttcttgagcactctttcattggggttcttctttagctctctattggtcactattgtgcataagactacagggcacaataagccatggctggcagacaatctcaaccaagggaagctttatgatttctattggcttttggcacttctgagtgctttgaatttggtgatctatttgttttgtgccaattggtatgtttacaaggacaagaggcttgctgaggagggcatagaattggaggaaccagagatttgtgcccatgcataa

SEQ ID NO: 313 - protein, 596 aa, Prunus persica
MSNCTLPETQEKLTLPDAWDFKGRPAERSKTGGWTAAAMILGGEACERLTTLGIAVNLVTYLTGTMHLGNATSANTVTNFLGTSFMLCLLGGFVADTFLGRYLTIAIFATFQAMGVTILTISTTIPSLRPPKCTSDTSTPCIPASGKQLMVLYIALYLTALGTGGLKSSVSGFGSDQFDESDKQERRQMTNFFNWFFFFISIGSLAAVTVLVYIQDNLGRQWGYGICVCAIVLGLIVFLSGTRRYRFKKLVGSPLTQISGVCVAAWRKRNMELPSDMSFLYNVDDIDDGLKKKKKQKLPHSKQFRFLDKAAIKEPKTTSGTAMIINKWSLSTLTDVEEVKLIIRMLPIWATTIMFWTVYAQMTTFSVSQATSMDRHIGKSFQIPPASLTAFFVGSILLTVPVYDRLIVPMARKALENPQGLTPLQRMGVGLVFSIFAMVAAALTEVKRLNIARSHGLTDNPTAEIPLSVFWLVPQFFFVGSGEAFTYIGQLDFFLRECPKGMKTMSTGLFLSTLSLGFFFSSLLVTIVHKTTGHNKPWLADNLNQGKLYDFYWLLALLSALNLVIYLFCANWYVYKDKRLAEEGIELEEPEICAHA

SEQ ID NO: 314 - DNA, 1752 bp, Alnus glutinosa
  CDS (1)..(1752)
atggaggaaagcaagaagagttgcttcatctcagatagagttgactacaagggtgaccctgccgataggaacacaacgggtggttgggtgccggcggctctaatcgtaggtattgaagtaagcgagagactgtcaacaatgggaataattgtgaaccttgtgacgtatctaaaaggcacaatgcatcagtctagtacaacctcctcaaacagcacatcaaatgtagcaggcacatcatttcttctgtgtttgcttggagggattctcgccgattctttccttggccgatattggacaatcgccattttctctgtaattcatgcactggggacatgcatgctggctatatcggcagcactgccagaactacgcccttctgaatgcaacctgcatcatgattttcctctcaaatgtgaagagcccagcagcttccaaatgggcattttgtatactgctctctactcaatggctctaggagtcggcgggataaagtctagtgtttcagggtttggaacagagcagtttgatcaaaacgatgagaaagaaatgtctgaaatggcccatttcttcaacaggttttacctcatcatcagcttcggaaccctactagccgttaccgtgcttgtttatgtacaagaccaagtgggacggagctggggatatgggatttgctcggcctccatgtttctttcaatagttgccttccttgtcgggactaaaagatataggtacagggagtgtaccggaagccctatcattcaaattctacaggttatagtggctgctataaggaaaaggaaggccgagcttccaactgatcttagcttcttatacgacaaagcttctgataaggaatcaacgatctctcatacagataaatatagttgtttggacaagggggcaatcataaccggaatggaccgtggagctgatgggttaacgatttccaatccatggggactttgtacagtcaccgaggtggaagaagtaaaaatgttgatcagaatattgccaataatggcttcaacgataatcttttggacaatacgtgcacagctgctaagcttctcagtgcaacaagctgccaccatggagagaacaatcgaaaatttcccaatcccaccagcttcattcaacggcttcttcgtgggatccacaattatcactctcatcatgtatgaccgcctactgcctttcttgagacaatcatccaatggggttcaaggtttcacaaatttgcaaaaaatagggatagcaatattcttaagcattttaggaatggcagctgcatcatttgcggaaatgaaacgattagaagttgttagagccaatagaggtagcacaagcacctcaagtactctaccaataactgccttctacttgcttccacaattcgtcttggtcggtatcggggacgggtttatgtatactggtcagcttgatttcttcataaccgagtcacccaaagggatgaaagcaattagcaccggcctgttcctcacaaccaacgcccttggtttctttggaagtagtattttggtcacaatcataacgaaagtcacaggggaagaggttgggcatggttggctactgtccaggataaatgatagcagattggattttttctatgctttgctggctgtgctagggtttatcaatttggtattttatctggtcttggcatcatggtataagccaagtcctgttgaagatgctcatcagaagataaatggtaaagaagaaaaagtgtga

SEQ ID NO: 315 - protein, 583 aa, Alnus glutinosa
MEESKKSCFISDRVDYKGDPADRNTTGGWVPAALIVGIEVSERLSTMGIIVNLVTYLKGTMHQSSTTSSNSTSNVAGTSFLLCLLGGILADSFLGRYWTIAIFSVIHALGTCMLAISAALPELRPSECNLHHDFPLKCEEPSSFQMGILYTALYSMALGVGGIKSSVSGFGTEQFDQNDEKEMSEMAHFFNRFYLIISFGTLLAVTVLVYVQDQVGRSWGYGICSASMFLSIVAFLVGTKRYRYRECTGSPIIQILQVIVAAIRKRKAELPTDLSFLYDKASDKESTISHTDKYSCLDKGAIITGMDRGADGLTISNPWGLCTVTEVEEVKMLIRILPIMASTIIFWTIRAQLLSFSVQQAATMERTIENFPIPPASFNGFFVGSTIITLIMYDRLLPFLRQSSNGVQGFTNLQKIGIAIFLSILGMAAASFAEMKRLEVVRANRGSTSTSSTLPITAFYLLPQFVLVGIGDGFMYTGQLDFFITESPKGMKAISTGLFLTTNALGFFGSSILVTIITKVTGEEVGHGWLLSRINDSRLDFFYALLAVLGFINLVFYLVLASWYKPSPVEDAHQKINGKEEKV

SEQ ID NO: 316 - DNA, 1785 bp, Nicotiana tabacum; identical to SEQ ID NO: 57
  CDS (1)..(1785)

SEQ ID NO: 317 - protein, 594 aa, Nicotiana tabacum; identical to SEQ ID NO: 58

SEQ ID NO: 318 - DNA, 1785 bp, Nicotiana tabacum; identical to SEQ ID NO: 59
  CDS (1)..(1785)

SEQ ID NO: 319 - protein, 594 aa, Nicotiana tabacum; identical to SEQ ID NO: 60

SEQ ID NO: 320 - DNA, 1815 bp, Cucumis sativus
  CDS (1)..(1815)
atggagattgagtccctcagagtgagtgttgatgagaaggttctgaaagatgaagagaaaaatgagaaagaagaaatgaagatgaagatgaagatgaagagaaagcttggtggtgtcaagacaatgcctttcattcttggaaatgaagtgtgcgatagatttgcaagctcagggtttcattccaacattataacatatttgacacaagatcttaacatgcctcttgttcctgcctccaacattctcaccaactttgctgcaacttctagcttcacttcccttatcggcgctctcattgccgattcctttgctggtcgcttctggaccatcaccatcgcctccatcatctatgagctcggaatggttaccatcaccatttcagctatactcccatcgctccacccgccaccttgccccacccaaatcaattgcacgcaagcatccggcacgcaactaatgatcctttatctcgccctactcctcacatctcttggcgcaggcggtattcgaccctgtgttgttgcatttgccgccgaccaattcgacatgacgaaggtcggtattgcagggcgaacgtggaacttcttcaattggtactatttttgcatgggaatggcgactctcacagccctgaccgtggtggtgtatattcaagacaacgtggggtgggggtgggggttcggccttccgaccatagccatggccttgtctgttgtggcatttgttgtgggctcgccactttacaacaaactcaagccaagtgggagccctttggttcgattggctcaggttgtggttgcggccttcaagaaccgaaaggctgttttgcctgatgactctaagcttttgtataggaaccatgagcttgatgctgccattgctattcaaggaaggcttgtccacactgatcagttcaagtggttggacaaggctgcagtcataacaagtccggattcaacagccaatccaccgaatctgtggcggctggccaccgtgcacagagtcgaagagctaaaatccatcattagaatgcttccaatatgggcggccggaatcctcctagtgacagcctcatctcatcaacacagcttcacaatccaacaagctagaacaatgaaccgtcatctaacacccaccttccaaattccacccgccaccctctccatcttcggcatcctatcgatgctcaccggcctcgttctctacgaccgtctcctcgtccccttcgccaaaaagctcacccacaacccctcgggcatcacttgcctccaacgaatgggtgtaggtttcgccatcaacatcctcgccaccctagtctcatccattgttgaaatcaaacgaaaaaaagtcgctgcaaaccatggtttgctcgacaatccaaccgcaacaattccatttagcgtgttttggttggtaccacagttttggcttcatgggatcgcggaggtgttcatgtcggttgggcatttggagttcatgtacgaccagtcgccggagagcttgaggagtacagcaacggcgttgtattggctcgcaatatcggtgggaaattatatagggacattgatggtttatcttgtgcataagtatactggggaagagcataattggttgcctgataggaatttgaatagaggaagattggagtattattattggttagtgagtgggattcaagttatgaatcttgtgtattatgtgatttgtgcttggttttatacttataagcctttggaagaggagaagattaacatagagaacaaagatggtgatcaagagtgggagaggtgtgaagacacaattaagatagcttaa

SEQ ID NO: 321 - protein, 604 aa, Cucumis sativus
MEIESLRVSVDEKVLKDEEKNEKEEMKMKMKMKRKLGGVKTMPFILGNEVCDRFASSGFHSNIITYLTQDLNMPLVPASNILTNFAATSSFTSLIGALIADSFAGRFWTITIASIIYELGMVTITISAILPSLHPPPCPTQINCTQASGTQLMILYLALLLTSLGAGGIRPCVVAFAADQFDMTKVGIAGRTWNFFNWYYFCMGMATLTALTVVVYIQDNVGWGWGFGLPTIAMALSVVAFVVGSPLYNKLKPSGSPLVRLAQVVVAAFKNRKAVLPDDSKLLYRNHELDAAIAIQGRLVHTDQFKWLDKAAVITSPDSTANPPNLWRLATVHRVEELKSIIRMLPIWAAGILLVTASSHQHSFTIQQARTMNRHLTPTFQIPPATLSIFGILSMLTGLVLYDRLLVPFAKKLTHNPSGITCLQRMGVGFAINILATLVSSIVEIKRKKVAANHGLLDNPTATIPFSVFWLVPQFWLHGIAEVFMSVGHLEFMYDQSPESLRSTATALYWLAISVGNYIGTLMVYLVHKYTGEEHNWLPDRNLNRGRLEYYYWLVSGIQVMNLVYYVICAWFYTYKPLEEEKINIENKDGDQEWERCEDTIKIA

SEQ ID NO: 322 - DNA, 1818 bp, Glycine max
  CDS (1)..(1818)
atgacaggcgtagagacaatgggaaaaaatgagaatcaaagtgtggaaaaaaatgagaaaagtgtcatagatgaggagccaaagattaactacagaggatggaaagtcatgccctttatcattgggaatgaaacttttgagaagctaggaaccattggaaccttagccaacctcttggtctatctcacaaccgtcttcaacttgagcagtcttacagctacaaatattattaacatcttcactggcagcgccagtttatctaccttgcttggggcttttctttgtgacacttattttggccgctacaagacactgggattctgcacaattgcttcttttctggggttgcttgttatacaactaacagcatggattaagaaaatgcatccacctcactgtggaagtgagagcatcacatgcacaggcccaaccacagggcaaatgacatttctgcttgctggatttggacttctaattgtgggagctgcagggatcagaccttgtaacttagcatttggagttgatcagttcaaccccaacactgagtctggaaaaaagggaatcaacagcttcttcaattggtacttctttacctacacatttgctcaaatggtgtctttgtcactaattgtctacatacagtcaaacgttagctgggcaatagggttgggaattcctgcggctttgatgctaatctcttgcacactctactacacgggaagcaattattacgtgaaagttaaagcaactggtccagctccactaacaagtttagctcaagctgtagttgtggctataaagaaaagaagactgaatctatcagaatatccactggattcttcgctctttgcctatgtttctccccagtctattaactccaagcttcttcacacgtctcagttcaggttcctagacaaagctgcaattataaccccacaagacggcataaacccagacgggtctgcatcagatccttggagtctttgcagcatgcaacaagtggaagagctaaaatgcttgctgagagtgattcccatttggttcgcaggaattttcttctacattgcaatagtccaacagaacacaatgctggtcttccaagcccttcaatccgacagacgcattctcagcaccaacttcaagatcctagcagcctcctacaccatcttccagatgctgagcctaaccatatggctacccatctacgaccgaatcctcgtgccgtcgctccaaagggtcaccaaaaaagagggtggcatcacagttcttcaaagaataggctttggcatgttcctctctatactatgcacaatggtgtctggtgtagtggaagaaagaagaaggacattggctttgaccaatcctattggattagagccaagaaaaggtgccatttcttcaatgtcaggtctatggttggttcctcagctaacactggcagggttatctgatgcattcgcgattgtgggacaagttgagtttttctacaaacagtttccagagaacatgaaaagccttgcagcgtctctatttttctgtggcctcgcgggatcaagttatttgagtagtttgctgatttctattatccatagggcgacagctaaatcttcaactgggaattggttacctcaggatctcaataaggggagattggattatttttattacattataactgctctagcagtcgttaatttcggttactttatattgtgtgccaagtggtataaatacaaagggactggttctagcagcagtggtgaccttcaactcgatcaagtatccaaaccatccgaaagaactgttaacactgtctag

SEQ ID NO: 323 - protein, 605 aa, Glycine max
MTGVETMGKNENQSVEKNEKSVIDEEPKINYRGWKVMPFIIGNETFEKLGTIGTLANLLVYLTTVFNLSSLTATNIINIFTGSASLSTLLGAFLCDTYFGRYKTLGFCTIASFLGLLVIQLTAWIKKMHPPHCGSESITCTGPTTGQMTFLLAGFGLLIVGAAGIRPCNLAFGVDQFNPNTESGKKGINSFFNWYFFTYTFAQMVSLSLIVYIQSNVSWAIGLGIPAALMLISCTLYYTGSNYYVKVKATGPAPLTSLAQAVVVAIKKRRLNLSEYPLDSSLFAYVSPQSINSKLLHTSQFRFLDKAAIITPQDGINPDGSASDPWSLCSMQQVEELKCLLRVIPIWFAGIFFYIAIVQQNTMLVFQALQSDRRILSTNFKILAASYTIFQMLSLTIWLPIYDRILVPSLQRVTKKEGGITVLQRIGFGMFLSILCTMVSGVVEERRRTLALTNPIGLEPRKGAISSMSGLWLVPQLTLAGLSDAFAIVGQVEFFYKQFPENMKSLAASLFFCGLAGSSYLSSLLISIIHRATAKSSTGNWLPQDLNKGRLDYFYYIITALAVVNFGYFILCAKWYKYKGTGSSSSGDLQLDQVSKPSERTVNTV

SEQ ID NO: 324 - DNA, 1794 bp, Glycine max
  CDS (1)..(1794)
atgacaggagtagaggctatggaaaaaaatgagaaaagtgtgacagatgaggagccaaagattaactacagaggatggaaagtcatgccctttatcattgggaatgaaacttttgagaagctaggaaccattggaaccttggccaacctcttagtctatcttacaaccgtcttcaacttgagcagtcttgcagctacaaatattgtcaacatctttaatggcagcgccagtttatctaccttgctcggggcttttctttgtgacacttattttggccgctacaagacactgggattctccacaatggcttcttttctggggttgcttgttatacaactaacagcatggattaagaaaatgcatccacctcactgtggaagagacagcatcacatgcataggcccaaccacagggcaaatgggatttctacttgctggatttggacttctaattgtgggggctgcagggattagaccttgtaacttagcatttggagttgatcagttcaaccccaacactgagtctggaaagaagggaatcaatagcttcttcaattggtacttctttaccttcacatttgctcagatggtgtctttgtcactaattgtctacatacagtcaaacgtgagctgggcaatagggttgggaattcctgcggctttgatgctaatctcttgcacactctactacacgggaagcaattattacgtgaaagttaaagcaactggtccagctccactaacaagtttagctcaagctgtagttgtggctataaagaaaagaagactgaatctatcagaatatccactggattcttcgctctttgcctatgtttctccccagtctattaactccaagcttcttcacacgtctcagttcaggttcctagacaaagctgcaattataaccccacaagacggcataaacccagacgggtctgcatcagatccttggagtctttgcagcatgcaacaagtggaagagctaaaatgcttgctgagagtgatccccatttggttcgcaggaattttcttctacattgcaatagtccaacagaacacaatgctggtcttccaagcccttcaatccgacagacgcattctcagcaccaacttcaagatcctagcagcctcctacaccatcttccagatgctgagcctaaccatatggctacccatctacgaccgaatcctcgtgccgtcgctccaaagggtcaccaaaaaagagggtggcatcacagttcttcaaagaataggctttggcatgttcctctctatactatgcacaatggtgtctggtgtagtggaagaaagaagaaggacattggctttgaccaatcctattggattagagccaagaaaaggtgccatttcttcaatgtcaggtctatggttggttcctcagctaacactggcagggttatctgatgcattcgcgattgtgggacaagttgagtttttctacaaacagtttccagagaacatgaaaagccttgcagcgtctctatttttctgtggcctcgcgggatcaagttatttgagtagtttgctgatttctattatccatagggcgacagctaaatcttcaactgggaattggttacctcaggatctcaataaggggagattggatagattatattacattataactgctctagaagtcgttaatttcggttactttatattgtgtgccaagtggtataaatacaaagggactggttctagcagcagtggtgaccttcaactcgatcaagtatccaaaccatccgaaagaactgttaacactgtctag

SEQ ID NO: 325 - protein, 597 aa, Glycine max
MTGVEAMEKNEKSVTDEEPKINYRGWKVMPFIIGNETFEKLGTIGTLANLLVYLTTVFNLSSLAATNIVNIFNGSASLSTLLGAFLCDTYFGRYKTLGFSTMASFLGLLVIQLTAWIKKMHPPHCGRDSITCIGPTTGQMGFLLAGFGLLIVGAAGIRPCNLAFGVDQFNPNTESGKKGINSFFNWYFFTFTFAQMVSLSLIVYIQSNVSWAIGLGIPAALMLISCTLYYTGSNYYVKVKATGPAPLTSLAQAVVVAIKKRRLNLSEYPLDSSLFAYVSPQSINSKLLHTSQFRFLDKAAIITPQDGINPDGSASDPWSLCSMQQVEELKCLLRVIPIWFAGIFFYIAIVQQNTMLVFQALQSDRRILSTNFKILAASYTIFQMLSLTIWLPIYDRILVPSLQRVTKKEGGITVLQRIGFGMFLSILCTMVSGVVEERRRTLALTNPIGLEPRKGAISSMSGLWLVPQLTLAGLSDAFAIVGQVEFFYKQFPENMKSLAASLFFCGLAGSSYLSSLLISIIHRATAKSSTGNWLPQDLNKGRLDRLYYIITALEVVNFGYFILCAKWYKYKGTGSSSSGDLQLDQVSKPSERTVNTV

SEQ ID NO: 326 - DNA, 1767 bp, Brassica napus; identical to SEQ ID NO: 69
  CDS (1)..(1767)

SEQ ID NO: 327 - protein, 588 aa, Brassica napus; identical to SEQ ID NO: 70

SEQ ID NO: 328 - DNA, 1785 bp, Nicotiana plumbaginifolia
  CDS (1)..(1785)
atggcacttcctgagacacagcaagattcaaaagctttaccagatgcctgggattataaaggcagaccagctcttagatcctcctctggtggttgggctagtggtgcaatgattttaggtgttgaagctgtggagaggctaacaacactagggattgctgtaaatttggtgacatatttgactggaactatgcatttagggaatgctactgcagccaacaatgttaccaattttcttggaacttctttcatgctcactttacttggtggttttgttgctgacactttcctcggaaggtatcttacaattggtatctttgccactgttcaagcaatgggtgttacaatcttgaccatttccaccataatcccaagcctacgtccaccaaaatgtgaacaagttggtagctcatcatgcattcccgcaaatagcaaacaacttatggtcctatacattgccctatacatgacggcgctcggcaccggcggcctaaaatcgagcgtctccggctttggcaccgaccaattcgacgatggtgacaaaaaagaaaaaggtcaaatgataaaattcttcgattggttctttttctttattaatgtaggctcgctcggcgcagttacagtattggtgtatattcaagataatttgggaagagaatggggttatggaatatgtgcatgtgctattgttattggacttgttgtgttcttatctgggacaagaaaatataggttcaagaaacttgtgggcagtccattgacacaaatcgcttcagttattgtggctgcttggaaaaaaacacatttggaattaccttcaaattcttcacttctctttgaaattgataatatttttggtgaaggaaataaaaaaagcaagcaaaagttgcctcatagcaaggaataccgattcttggacaaggcagccattaaggaagataatgaccttgaatctaatggcactaaagtggtaatcaacaagtggaaattagcaaccttaaccgatgttgaagaagtaaaattattaatcagaatgttaccaacttgggccacaactattatgttctggactgtgtatgcacaaatgaccacattttctgtgtcaaaagctacaacaatggatcgtcacattggaacctttgaaattccaccggcttcactcaccgtatttttcgtcggaagtatactcttgaccgtaattttctacgatagaattatcgttcctatttgtcgtcgtttcatgaataaacctcatggacttaccccattacatagaattttcacagggctagttctttcaattttggccatgattgctgctgccctaacggaggttaagaggctaaaagtggcacatttgcatggattgaccaatgatgcaaatgccacaattccattgactgtattttggctagttccgcaattcttgctagttggggcaggtgaagcatttacatatattggccaacttgattttttcttgagggaatgtccaaaagggatgaagacaatgagtacagggctatttttgagtacacttgcacttggattttttgttagttctattttggttacaattgtgcatgttgtgactgggacaaaaaatccatggctagctgataatttgaaccaagggaggttatatgatttctattggcttttggcaatattgagtgtgtttaatttgatgtttttcttgtattcgtcgagaaaatatgtgtacaaggagaagaggcttgctgaaatggggattgaattggaagatgatggaccggtttgtcattga

SEQ ID NO: 329 - protein, 594 aa, Nicotiana plumbaginifolia
MALPETQQDSKALPDAWDYKGRPALRSSSGGWASGAMILGVEAVERLTTLGIAVNLVTYLTGTMHLGNATAANNVTNFLGTSFMLTLLGGFVADTFLGRYLTIGIFATVQAMGVTILTISTIIPSLRPPKCEQVGSSSCIPANSKQLMVLYIALYMTALGTGGLKSSVSGFGTDQFDDGDKKEKGQMIKFFDWFFFFINVGSLGAVTVLVYIQDNLGREWGYGICACAIVIGLVVFLSGTRKYRFKKLVGSPLTQIASVIVAAWKKTHLELPSNSSLLFEIDNIFGEGNKKSKQKLPHSKEYRFLDKAAIKEDNDLESNGTKVVINKWKLATLTDVEEVKLLIRMLPTWATTIMFWTVYAQMTTFSVSKATTMDRHIGTFEIPPASLTVFFVGSILLTVIFYDRIIVPICRRFMNKPHGLTPLHRIFTGLVLSILAMIAAALTEVKRLKVAHLHGLTNDANATIPLTVFWLVPQFLLVGAGEAFTYIGQLDFFLRECPKGMKTMSTGLFLSTLALGFFVSSILVTIVHVVTGTKNPWLADNLNQGRLYDFYWLLAILSVFNLMFFLYSSRKYVYKEKRLAEMGIELEDDGPVCH

SEQ ID NO: 330 - DNA, 1773 bp, Nicotiana plumbaginifolia
  CDS (1)..(1773)
atggcacttcctgaaacacaacaagatactaaaactctaccagatgcctgggattacaaaggtcgaccagctgttcgttcctcgtcaggcggttggtccagcgccgccatgattttagggattgaggcagtggagaggctgacgacgttaggtattgctgtaaatttggtgacatatttgactggaaccatgcatttaggaaatgctagttcggccaacaatgttactaattttcttggaacttcatttatgctcactttgcttggtggtttcgtagccgacacttttcttggacggtatcttacaattggtatctttaccactattcaagccatgggtgttaccatattgaccatctccaccataatcccaagcctacgaccaccaaagtgttccccaggtagctcaacatgcattccagcaagttccaaacaactcatggttttatacatagcattatacatgacggcgctcggcactggcggcctgaaatccagcgtctccggcttcggttccgatcagttcgacgaaaccgacaagaaagaaagaggacagatgataaaattcttcaactggttctttttcttcattaatgtgggatcacttggtgcagtgacagtattagtgtatattcaagataatttgggaagagaatatggttatggaatatgtgcttgtgctattgttattggtttggtcatattcttatcggggacaagaaaatatcgtttcaagaaacttgtgggaagtccattgacacaaattgcttcagtttttgtggctgcttggaacaaaagacatatggatttgccttctgattctactcttttatataatattgatgatattcctggggatggaaataaaaaagctaagcagagattgcctcacagcaaagaattccgtttcttggacaaggcagctattaaagtacaggacactgaatccgctggaattactgtggtaaataaatggaatttatcaactttaaccgatgttgaagaagtaaaattagtagtccgaatgttaccaacatgggccacgaccattatgttttggactgtctatgctcaaatgacaacattttccgtgtcacaagctacaaccatggaccgtcacataggaaatttcgaaattcctccggcatcattgacgctcttcttcgtcggaagtatcctcttaacgtgcatattctacgaccgtgccgtcgtgccggtttgtcgacgtgtcctcaacaatcctcacggtacaaccccgttgcaacgtattgcagttggtttaattctttcaattatagccatggttgctgctgctttaactgaagtgaagagattgaacgttgcacatttgcatggattgaccaatgatgctaatgccaaagttcctttgagtgttttttggttagttccgcaattcttgctagtaggggcaggtgaggcatttacttatattggacaacttgatttctttctaagggaatgtcctaaaggaatgaagacaatgagtacagggttattcttgagtacactttcattagggtttttcgttagttctattttggtgactatagtgcataaggtgacagtgaaaaacccatggttagctgataatttaaaccaagggaggctctatgatttctattggttattggcaacgttgagtgtgttgaatttgatggttttcttgtttatatcaagacggtatgtgtacaaggaaaagagacttgctgagtgtgggattgaaatggaggattcagaaccagcttgccactaa

SEQ ID NO: 331 - protein, 590 aa, Nicotiana plumbaginifolia
MALPETQQDTKTLPDAWDYKGRPAVRSSSGGWSSAAMILGIEAVERLTTLGIAVNLVTYLTGTMHLGNASSANNVTNFLGTSFMLTLLGGFVADTFLGRYLTIGIFTTIQAMGVTILTISTIIPSLRPPKCSPGSSTCIPASSKQLMVLYIALYMTALGTGGLKSSVSGFGSDQFDETDKKERGQMIKFFNWFFFFINVGSLGAVTVLVYIQDNLGREYGYGICACAIVIGLVIFLSGTRKYRFKKLVGSPLTQIASVFVAAWNKRHMDLPSDSTLLYNIDDIPGDGNKKAKQRLPHSKEFRFLDKAAIKVQDTESAGITVVNKWNLSTLTDVEEVKLVVRMLPTWATTIMFWTVYAQMTTFSVSQATTMDRHIGNFEIPPASLTLFFVGSILLTCIFYDRAVVPVCRRVLNNPHGTTPLQRIAVGLILSIIAMVAAALTEVKRLNVAHLHGLTNDANAKVPLSVFWLVPQFLLVGAGEAFTYIGQLDFFLRECPKGMKTMSTGLFLSTLSLGFFVSSILVTIVHKVTVKNPWLADNLNQGRLYDFYWLLATLSVLNLMVFLFISRRYVYKEKRLAECGIEMEDSEPACH

SEQ ID NO: 332 - DNA, 1680 bp, Prunus dulcis
  CDS (1)..(1680)
  misc_feature (136)..(136): n is a, g, c or t
atgggttctcttgaggaggaaagatcgctcttggaagatggtcttattcaggatgaaaccaatggactgtacactggagacggttcagttgacattaccgggaagcctgttcttaagcaaagtactgggaattggngagcgtgccccttcattctaggtactgaatgttgtgaacgtttggccttctatgggatttccactaacctggttacatatctcacacacaaattgcacgaaggaaatgtgtctgcagcaagaaatgttaccacttggtcgggcacttgctatctcacacctctaattggagctgtcctagcagatgcttactgggggagatattggactattgctattttctccaccatttatttcattgggatgtgtactttgactatctcggcatcagttcctgcactgaagcctccccaatgtgtggattcagtatgtccttcagctagtccggcacagtatggagtattcttctttgggctctatctgattgctctacggactggtgggatcaagccatgtgtttcatcctttggggctgatcagtttgatgatactgattctagggaaagagtaaagaagggatccttcttcaactggttttacttttcaatcaacattggtgctctagtatcgagtactctaatagtctgggttcaagacaatgctgggtggggattaggttttggtattcctgcattgtttatgggcatcgctattgttagtttcttttctggcacacccctatatagatttcagaaaccggggggaagccctcttacaagaatgtgccaggttttggttgcatcatttcgtaagtggaatttggacgtccctagagacagcagtctcctgtatgaaacacaagataaaggctctgccattaaaggaagtcgtaagctggagcacagtgatgaactgaattgccttgataaagctgctgtgatatcagaaactgagaccaaaactggggacttctccaatccatggaggatttgcactgtaacacaagtggaggagttgaagattttaatacgaatgtttccaatctgggctactggaattgtcttttctgctgtttatgcccaaatggcgactatgtttgtggaacaagggatgatgatggacacatctgttgggtctttcaccattcccccggcctccctctcatcttttgatgtcatcagtgttattttctgggtccccatttatgacaggtttattgtcccgattgctaggaaatttaccggtaaagaaaggggtttctcagagttgcagcggatgggtattggtctctttctgtcagtgctatgcatgtcggctgctgccgtggtagagatgaaacgattgcagcttgcaacagaacttggtttggttgacaaagaggtagctgtaccgctcagtatcttttggcaaatacctcaatatttcttgttgggtgctgccgagatattcacattcattgggcagctggagttcttctatgaccaatcttcagatgctatgcggagtttgtgcagtgcattgtccgcttctgacgacttcattgggaaactatctgagctctttgattctgacatcgtgacttacttcacaacacagggcggtaaggccggatggataccagacaatttgaatgatggccatttggattatttttctggctcttag

SEQ ID NO: 333 - protein, 559 aa, Prunus dulcis
  misc_feature (46)..(46): The Xaa at location 46 stands for Stop, Arg, or Gly.
MGSLEEERSLLEDGLIQDETNGLYTGDGSVDITGKPVLKQSTGNWXACPFILGTECCERLAFYGISTNLVTYLTHKLHEGNVSAARNVTTWSGTCYLTPLIGAVLADAYWGRYWTIAIFSTIYFIGMCTLTISASVPALKPPQCVDSVCPSASPAQYGVFFFGLYLIALRTGGIKPCVSSFGADQFDDTDSRERVKKGSFFNWFYFSINIGALVSSTLIVWVQDNAGWGLGFGIPALFMGIAIVSFFSGTPLYRFQKPGGSPLTRMCQVLVASFRKWNLDVPRDSSLLYETQDKGSAIKGSRKLEHSDELNCLDKAAVISETETKTGDFSNPWRICTVTQVEELKILIRMFPIWATGIVFSAVYAQMATMFVEQGMMMDTSVGSFTIPPASLSSFDVISVIFWVPIYDRFIVPIARKFTGKERGFSELQRMGIGLFLSVLCMSAAAVVEMKRLQLATELGLVDKEVAVPLSIFWQIPQYFLLGAAEIFTFIGQLEFFYDQSSDAMRSLCSALSASDDFIGKLSELFDSDIVTYFTTQGGKAGWIPDNLNDGHLDYFSGS

SEQ ID NO: 334 - DNA, 1743 bp, Lycopersicon esculentum
  CDS (1)..(1743)
atgaaatacctcttctcgaagaatggtggccttcttgaggatgagaatagtggactctatactagggatggttctgttgatataaagggtaatcctgtcttaaaaagtgagacagggaactggagagcttgcccatttattcttggtaatgaatgttgtgaacgtttggcatactatggcattgctgctaatcttgttacttatcttactaaaaagttacatgagggaaacgtttcagctgctagaaatgtcactacttggcaaggcacttgttacataacgcccctaattggggctgtactggcagatgcatactggggaagatattggacgattgctaccttctcaactatctacttcatcggcatgtgcacgttgacactatcggcttcagttcctgcttttaagccccctcaatgtgtgggctctgtgtgcccttcggcatctcctgcccagtatgccatattcttttttggcctctatctgattgctcttggtactggtgggatcaaaccatgtgtttcgtcatttggagctgatcaatttgatgacacagatccaaaagagagggttaaaaagggatccttcttcaattggttctatttttctatcaacattggagctttgatatcaagcagtttgatcgtgtggattcaagaaaatgctggatggggccttgggtttggcatccctgcagttttcatgggcattgccattgcaagtttcttttttggtacaccactctacagatttcagaagcctgggggaagtcctctcacaagaatgtgccaggttttggttgcagtattccacaaatggaacttgtctgtccccgatgatagtacactactttatgagaccccagacaaaagctctgcaattgaagggagccgaaagctgttgcacactgatgaactaaggtgcctcgacaaagctgctgtagtttcagacaacgaattgacgactggggactattccaatgcttggaggctctgtactgttacgcaggttgaggaactgaaaattttgatccgcatgtttccgatatgggcaactggtatagtcttttctgctgtttatgcacaaatgtctacaatgtttgtggagcaagggatggtgatggacactgccgttggttccttcaaaattcctgcagcatctctttctactttcgataccattagtgttattgtgtgggtcccagtctatgataagatccttgttccaattgcaaggaggtttactggaatagagaggggattttccgagttacagaggatgggtattggacttttcctttcaatgttgtgcatgtctgctgctgctatcgttgagatcaggcgcctacaacttgcaagagaccttggattggtggatgaagccgtttcagtacctctcagtatcttttggcagattccgcaatattttatactgggtgcagctgagatatttactttcattgggcagcttgagtttttttatgatcaatcacctgatgcaatgcgtagcttgtgcagtgcattgtcactgctgacaactgctttgggtaattacttgagctctttcatcctgactgtagtaacgtccattacaactcgaggtggcaaacctggatggattccaaacaacttgaacggtgggcatcttgattatttcttctggcttttggctgcacttagcttcttcaacttagtaatctatgtttttctgtgccaaatgtataaatccaagaaggcatcctaa

SEQ ID NO: 335 - protein, 580 aa, Lycopersicon esculentum
MKYLFSKNGGLLEDENSGLYTRDGSVDIKGNPVLKSETGNWRACPFILGNECCERLAYYGIAANLVTYLTKKLHEGNVSAARNVTTWQGTCYITPLIGAVLADAYWGRYWTIATFSTIYFIGMCTLTLSASVPAFKPPQCVGSVCPSASPAQYAIFFFGLYLIALGTGGIKPCVSSFGADQFDDTDPKERVKKGSFFNWFYFSINIGALISSSLIVWIQENAGWGLGFGIPAVFMGIAIASFFFGTPLYRFQKPGGSPLTRMCQVLVAVFHKWNLSVPDDSTLLYETPDKSSAIEGSRKLLHTDELRCLDKAAVVSDNELTTGDYSNAWRLCTVTQVEELKILIRMFPIWATGIVFSAVYAQMSTMFVEQGMVMDTAVGSFKIPAASLSTFDTISVIVWVPVYDKILVPIARRFTGIERGFSELQRMGIGLFLSMLCMSAAAIVEIRRLQLARDLGLVDEAVSVPLSIFWQIPQYFILGAAEIFTFIGQLEFFYDQSPDAMRSLCSALSLLTTALGNYLSSFILTVVTSITTRGGKPGWIPNNLNGGHLDYFFWLLAALSFFNLVIYVFLCQMYKSKKAS

SEQ ID NO: 336 - DNA, 1701 bp, Zea mays
  CDS (1)..(1701)
atggacgcggagaccggagatacccggtctcccctgctgccgcatcaccctcccagccagacgcaggtttcctcagcgaatcagcactataacaaacccttcagctggaaggccccagccattattttggccttcgaattcttggagagcattgcttactctggtatagcactcaacctggtcgtgtaccttggaaccgtcctccatggaaccaccgcctccaatgcagcgaacgtcgatgcgtggaacggcgccacgtttcttacgccggtccttggagcctttcttgctgatacatactgggggaagtacaagaccgcagctatctccataatattctacgttgttggcctgctcataattaccacctctgccgtcataccgtccctacggcctgcctcgtgtgaaggcggttcatgcccacctgcaacagggtttcagtattttgtgctctttggttcattgtacctcatctccattggtacggggggcgtcaagtcagctttacttccattgggagcagatcagtacaatgatgcgaacgccgaagagagtaaaagcaagcaactgttcttcagttggttcttcatggctgtcaaccttggagtgttcatctccggcactgttcttgtctggatacagcaaaatgtcgcttggtctcttggattcggcatctcctcgatatgccttgttatcgccgcagttgcctttttggttggaacaccgctttacagggttcaacttccaactgggagcccactcaagagtatagtcatggtgtttgttgcctcttataagaagagaggagtggcggttcctgctgatagcacactgttgtttgaagggaatgaatcaagcagcattgtgccgaacaaaattgaacacactgacgaattcaggtgcttagataaggctgctgtcgttgtagaggaccaagagatgaaggacagccatcgcccatggctactatgtacggtaacccaggtggaggaagtgaagattctgatccggatgcttccgatatggttcacctgtgtcttctattcggctgcaatgagccagactgctaccactttcgtccagcaggggaacgcgatgaacactaagatcgggtccttctcggtgccggcggcctctatgaactccgccgaggtgatcttcatgctcgtctgggttgtgttccaggacagcgtcgtcatcccgatagccaggaggtacacggggaacccgatggggctgacgctgctgcagcggatgggcgtcgggcggttgctggcgatcccatctctggcggccgccgcactggtggagacgtggaggctgcgcagcgtgaaggccgggcataacctgagcatcgggtggcagctcccgcagttcgtgatcctggcctgctccgacgtgttctgcggcatcgcgcagctggagttcttctacgcggaggcgcctgcgtccatgcgcagcctgtgctcggcattccagttcctggccatgtcgctggcgtactacgtgaacacgctggtggtcgcattggtggcgtccgtgaccacggcctggggcggcaagggctggctccccgctgacctcaacgacggccacctggactactacttctggctgtggacggggatcagtgtggtgaactacgtcgtgtacacggcatttgcaaggcgttatacggtcaagaaggttgtcggtcagtaa

SEQ ID NO: 337 - protein, 566 aa, Zea mays
MDAETGDTRSPLLPHHPPSQTQVSSANQHYNKPFSWKAPAIILAFEFLESIAYSGIALNLVVYLGTVLHGTTASNAANVDAWNGATFLTPVLGAFLADTYWGKYKTAAISIIFYVVGLLIITTSAVIPSLRPASCEGGSCPPATGFQYFVLFGSLYLISIGTGGVKSALLPLGADQYNDANAEESKSKQLFFSWFFMAVNLGVFISGTVLVWIQQNVAWSLGFGISSICLVIAAVAFLVGTPLYRVQLPTGSPLKSIVMVFVASYKKRGVAVPADSTLLFEGNESSSIVPNKIEHTDEFRCLDKAAVVVEDQEMKDSHRPWLLCTVTQVEEVKILIRMLPIWFTCVFYSAAMSQTATTFVQQGNAMNTKIGSFSVPAASMNSAEVIFMLVWVVFQDSVVIPIARRYTGNPMGLTLLQRMGVGRLLAIPSLAAAALVETWRLRSVKAGHNLSIGWQLPQFVILACSDVFCGIAQLEFFYAEAPASMRSLCSAFQFLAMSLAYYVNTLVVALVASVTTAWGGKGWLPADLNDGHLDYYFWLWTGISVVNYVVYTAFARRYTVKKVVGQ

SEQ ID NO: 338 - DNA, 1752 bp, Zea mays
  CDS (1)..(1752)
atggatgcccaagacggcgatgagagaccgctgatcatccatcgcctgccactactccaggatgaaagtacttccgaattcactagcgacgggacggttgatcttcgcaatcagcctgctcggaagcagagaactgggaagtggaaagcatgcttcttcatcttaggtgccgagtttgctgaatgtgtggccttcttcgcgatctcgaagaacctggtgacgtacctcacgggcgttctgcacgagagcaacgtggacgccgcgacgactgtgtccacctggatcgggacctcgttcttcacgccgctcgtcggcgcgttcttggccgacacattctgggggcgatactggacgatactggccttcctctccgtgtacgtcacggggatgacggtcctgactgcttcagctcttctcccgctgctcatgggcgcgtcctacagccgtagcgcccaccgcctcttcgcgtacctgggcctctacctcgccgctctcggcaccggcggaatcaagccgtgcgtctgcgcgctcggtgccgaccagttcgacgcgtctgaccccgtggagcggcgggccaagggctccttcttcaactggtactacttctccatcaacatcggctccctgctgtccgcgacggtggtcgtctgggtgcaggacaacgttgggtggggagtcgggttcgcgatcccgaccctgctcatgctgtcgggactcgtgctgttcgtcgccggtaggaaggtttacaggtaccagagagtgggagggagccctctgacaagagcctcgcaggtggtggttgctgctgtcaggaactaccgtttggtgctgcctgagcctgacgacagctcggccctgctgcatcaggcgcctcccggaacgacggaaggaaatgattccacgatgcagcatacgagtcaattcaggttccttgacaaggctgccattgtagcgccatcctccggcgagaaaggagcgacggcaagcccatggcggctctgcacggtctcccaggtcgaggagctgaagacggtgctgcggatgttccccgtgtgggtgtcgatggtgctcttcttcgcggccaccgcgcagatgtcgtccaccttcatcgagcaaggcgagaccatggacaaccgcgtggggccgttcaccgtgccgccggcgtccctctccaccttcgacgtcatcagcgtcatggtctgcatacccatctacgacaaagcgctggtgccgctggcccggcgcgccacgggcaaggagcggggcctgtcgcagctgcagcggctgggcgtcggcctcgcgctgtccgtggccggcatggtgtacgcggcgctgctcgaggccaggcggctgtcgctcgcccgcgcagcggcggacgggcggccgccgatgtccatcatgtggcaggcgccggcgttcgcggtgctcggcgcgggggaggtgttcgcgaccatcggcatcctcgagttcttctacgaccagtcgcccgacggcatgaagagcctcggcacggcccttgcgcagctcgccgtcgcggcaggcaactacttcaactctgccgtgctcgccgccgtcgccgccgtcaccacgcgcaacggggaggcaggatggatccccgacgacctggacaagggccacctcgactatttcttctggttcatggctgttctcggcgtggtgaacctgctgcacttcctgcattgctccgtcaggtacagaggcagcagcaacaacagcacatactcttcttga

SEQ ID NO: 339 - protein, 583 aa, Zea mays
MDAQDGDERPLIIHRLPLLQDESTSEFTSDGTVDLRNQPARKQRTGKWKACFFILGAEFAECVAFFAISKNLVTYLTGVLHESNVDAATTVSTWIGTSFFTPLVGAFLADTFWGRYWTILAFLSVYVTGMTVLTASALLPLLMGASYSRSAHRLFAYLGLYLAALGTGGIKPCVCALGADQFDASDPVERRAKGSFFNWYYFSINIGSLLSATVVVWVQDNVGWGVGFAIPTLLMLSGLVLFVAGRKVYRYQRVGGSPLTRASQVVVAAVRNYRLVLPEPDDSSALLHQAPPGTTEGNDSTMQHTSQFRFLDKAAIVAPSSGEKGATASPWRLCTVSQVEELKTVLRMFPVWVSMVLFFAATAQMSSTFIEQGETMDNRVGPFTVPPASLSTFDVISVMVCIPIYDKALVPLARRATGKERGLSQLQRLGVGLALSVAGMVYAALLEARRLSLARAAADGRPPMSIMWQAPAFAVLGAGEVFATIGILEFFYDQSPDGMKSLGTALAQLAVAAGNYFNSAVLAAVAAVTTRNGEAGWIPDDLDKGHLDYFFWFMAVLGVVNLLHFLHCSVRYRGSSNNSTYSS

SEQ ID NO: 340 - DNA, 1833 bp, Zea mays; identical to SEQ ID NO: 83
  CDS (1)..(1833)

SEQ ID NO: 341 - protein, 610 aa, Zea mays; identical to SEQ ID NO: 34

SEQ ID NO: 342 - DNA, 1779 bp, Zea mays
  CDS (1)..(1779)
atgcgtgtcggcggcgggcgggacgacgacgacgaggtgccccggaagctcaagagcatggacgtggacaagctggagaacggcggcggcggcggcgacgaggagagcccgcgccccgccgtcaagtaccacggctggaaggccatgcccttcatcatcgggaacgagacgttcgagaagctgggcacgctgggcacgtcggccaacctgctggtgtacctgacgcaggtgttccacatgcggagcgtggacgcggccacgctgctcaacgggctcaacggcaccaccagcctcgcccccatcatcggcgccttcctctccgacgcctacctcggccgctacctcgcgctcgccatcgcctccatagcctccctcatcggcatgttcctgctgacgatgacggccggcgcgaacagcctgcacccgccggagtgcaccgtgggcgagacctgcgagaaggcaacgtcgtaccagttcgcggtgctcttcgtcgccttcgcgttcctggtgctgggctcggcggggatccgcccctgcagcatgcccttcggcgccgaccagttcgaccccaacacggagtctggcaagcgcggcatcaacagcttcttcaactggtactacttcaccttcacggccgccatgatgatctccgccaccgtcatcatctacgtgcagagcaacgtgagctggcccatcgggctgggcatccccacggcactcatgttcctggcatgcgtgctcttcttcatgggcacgcgcctatacgtgcgggtgacgcccgaggggagccccttcaccagcgtcgtgcaggtgctatcagccgcgctcaagaagcggtcgctgaagcagcccaaggacccgaagcaggacctcttcgacccgccgcacaccagcgccatcgtcaccaagttggcgcacacggaccagttccgctgcctagacaaggcggccatcgtggcatccccggacgaggtgcgttccggcggcggcgcgcccgcggacccctggaggctctgcagcgtgcagcaggtggaggaggtcaagcacaccaaccacatcctgcccgtcgggtccacggggatcatctactacgtcgccgtggtgcagcagtccacgtacgtggtgctctcggcgctgcagtccgaccgccacctcggccgcgccggcttccagatccccgccgcgtccttcaccgtcttcgccatgctcgcgcagacgctgtggatccccttctacgaccgcctcctgctgcccaagctccggaagataaccggcaaggaggaggggttcacgctgctccagcgccagggcatcggcatcgcgctctccactgtcgccatggtcatctcggccatcgtcgaggaccggcgccgtgccatcgcgctcagccagccgacgctcggcaccaccatcactggcggggcgatctcggccatgtccagcctgtggatggtgccacagctcatgatcctggggctgtcggaggccttcaacctcatcagccagatcgagttctactacaaggagatcccggagcacatgcgcagcgtggccggggcgctcgccttctgcaacctggcgctcggcaactacctcagcggcttcctggttaccatcgtgcaccggacgacggggtccgggcagaactggctggcgcaggacctcaacaagggccgcctcgacctattctactggaccatcgccggaatcggcgtctttaacttcatctacttcgtcatctgcgccaggtggtacaggttcaagggggccagcaactga

SEQ ID NO: 343 - protein, 592 aa, Zea mays
MRVGGGRDDDDEVPRKLKSMDVDKLENGGGGGDEESPRPAVKYHGWKAMPFIIGNETFEKLGTLGTSANLLVYLTQVFHMRSVDAATLLNGLNGTTSLAPIIGAFLSDAYLGRYLALAIASIASLIGMFLLTMTAGANSLHPPECTVGETCEKATSYQFAVLFVAFAFLVLGSAGIRPCSMPFGADQFDPNTESGKRGINSFFNWYYFTFTAAMMISATVIIYVQSNVSWPIGLGIPTALMFLACVLFFMGTRLYVRVTPEGSPFTSVVQVLSAALKKRSLKQPKDPKQDLFDPPHTSAIVTKLAHTDQFRCLDKAAIVASPDEVRSGGGAPADPWRLCSVQQVEEVKHTNHILPVGSTGIIYYVAVVQQSTYVVLSALQSDRHLGRAGFQIPAASFTVFAMLAQTLWIPFYDRLLLPKLRKITGKEEGFTLLQRQGIGIALSTVAMVISAIVEDRRRAIALSQPTLGTTITGGAISAMSSLWMVPQLMILGLSEAFNLISQIEFYYKEIPEHMRSVAGALAFCNLALGNYLSGFLVTIVHRTTGSGQNWLAQDLNKGRLDLFYWTIAGIGVFNFIYFVICARWYRFKGASN

SEQ ID NO: 344 - DNA, 1740 bp, Zea mays
  CDS (1)..(1740)
atggaagcaaccgacgaggagaacgctctgcttcttcgtctccatcccactccgcaggtcgtagcttcggagtacgcaagtgatggttcagttgatatcaacaaacaacctgctctcaagcacagaacgggtaactggagggcatgctaccccgtcttaggtgtaggattcagtgaaggcatggtgttctctgcaatcgcgacgaatttagtgacgtatctcaccactgtgctccacgagagcaaggtggatgcagcgaaaaatatctccgcctggtccggagtgtgcttcctcacgccacttcttggggctttcgttgcggacagttacttgggaagatactggaccattgttgtggtcctcccggtctacatcgtggcaatgctcgtcctgatagcttcagcatcactcccggtattgttccagagcgacgtgcaccctgcagtggtttaccttggtatctaccttgccgccattgccagcggtggcgtgaagccctgcatttctgccttcggggctgatcaatttgacagcaatgacccggcggagctggtgaagaagggctccttcttcaactggtacttcttcctgacgaccaccagctccctgctgtctggcaccgtgattgtttggctgcaggacaatgttaggtgggcagtcagctacgtgatcccgaccgtgctcatgctcatctgtttccccgcatttttagctggctccagggtgtacaggtttagggaaatgggagtaagccccattacgagcttacttcaagtggttgttgcagctgtcaggaagtggaacgccaaactgccggacgatagctcgctgctatatgagcaggccagttcaccttgtacgactgaagcaagtcataagaacaagcataccaatcagttcaggttctttgacaaggccgccattgtcccaccaggcaacgaatccacggtgcagacgagtccatggaggctctgcacagtgacacaggtcgaggagctaaagatgctgctctcgacgctgcctacctgggcgtcgttcgtgattttctacgcagtcacgtctcagatgcagtcgacgatgattgagcaaggcatgctcatggacaaccacgttggctcgtttgccatcccgccggcatccatgccgatcattggtgtgctcagcttcctcatctgggtcgccgcctatgaaaccgtcctagcgccattggcgcggcgcttcaccgggaacgagaagggcttctcccagtggcagcgcctcgcgatcggccaagccctgtccattctgacaatggcgcttgctgcgctggtggagacaaggaggctggcgatcgcggaagccagcgggctgaggcatcgggaggtgccggtgcccatgagcatcctgtggcagggcccagttttctttgtgcatggtgcggccgaggtcttcggtgccatcggcatgacagagttcttctacgaccaagccccggcgaccatgaagagcctgtgcgccgcgttcgggcagctcgcggtggcttccgggtcgtacctcaacacggtcgtgctcagcgtcgttgcgttggccacaacgcgcggcggcgcaaccggatggatttcggacaacctcaatgaaggccatcttgactatttcttctggatgatggccgctcttagcttgctgaacctagctctgtttgtgcgctactcaatgcggcatacagacaggcaacgtaagcaagaccttggtttatcataa

SEQ ID NO: 345 - protein, 579 aa, Zea mays
MEATDEENALLLRLHPTPQVVASEYASDGSVDINKQPALKHRTGNWRACYPVLGVGFSEGMVFSAIATNLVTYLTTVLHESKVDAAKNISAWSGVCFLTPLLGAFVADSYLGRYWTIVVVLPVYIVAMLVLIASASLPVLFQSDVHPAVVYLGIYLAAIASGGVKPCISAFGADQFDSNDPAELVKKGSFFNWYFFLTTTSSLLSGTVIVWLQDNVRWAVSYVIPTVLMLICFPAFLAGSRVYRFREMGVSPITSLLQVVVAAVRKWNAKLPDDSSLLYEQASSPCTTEASHKNKHTNQFRFFDKAAIVPPGNESTVQTSPWRLCTVTQVEELKMLLSTLPTWASFVIFYAVTSQMQSTMIEQGMLMDNHVGSFAIPPASMPIIGVLSFLIWVAAYETVLAPLARRFTGNEKGFSQWQRLAIGQALSILTMALAALVETRRLAIAEASGLRHREVPVPMSILWQGPVFFVHGAAEVFGAIGMTEFFYDQAPATMKSLCAAFGQLAVASGSYLNTVVLSVVALATTRGGATGWISDNLNEGHLDYFFWMMAALSLLNLALFVRYSMRHTDRQRKQDLGLS

SEQ ID NO: 346 - DNA, 1779 bp, Zea mays
  CDS (1)..(1779)
atggatgaggcagcagggctgctgttgcaagaagagggtggaggtggggaccaagaagctctcctccttccacttccacaggatgttggcctttacacaggtgatggatctgttgatgtcaaagggcgccctgcgttaaagggcactacaggcaattggaaagcatgctttttcatcctagggaatgaatgttgtgaaaggctggcctactacggaattgcaaaaaacctagttacttatttgaaagtgaagcttcatctaggcaacctcgaggctgcaagacatgttaccacttggcaagggacatgctatctcactccccttgttggaggcatcttagcagactctcgttgggggaaatactggactattgctgttttctcatcggtttactttattggcctggctattttaacgctttctgcatcagtcccagcgttgcaaccaccttcatgtttaaggacagtttgtccagaagcaagcttacttcagtatggcatattttttggtggcctctatatgattgccctagggactggaggtatcaaaccttgtgtctcctcctttggagctgatcaatttgatgacactgaccaagcagagagagctaagaagggttcattcttcaattggttctacttctgtataaatataggttcattcatatcaggcactatgatagtgtggatacaagataacactggttggggaataggctttgcgattcctactatattcatggcattagctatttcattcttcttctcagcttcaaataagtacagattccaaaaacctggtgggagtccactcacaagagtgtgccaggtggttatagcagcatttcgtaagtggcacattgaagtgccacatgatacatctctcctatatgaagttgatggccaaacttcagcaattgaaggaagccggaagctggagcacacaaatgagctcgagttccttgatagagctgctgttatctcatctgctgatctgaagagtgaatcctttaccgacccatggaagctttgcacagttacccaggtggaagaattgaagatcctaataagaatgtttcccatttgggctactactatcatattcagtgctgtttatgcccaaaactcttccatgttcatagagcagggcatggttcttgacaagcgcattgggtctttcaacattcctcctgcatctctctccacttttgatgtaatcagcgtcatcatgtgggtcccactctatgaccgcatcctggtgccactagctagaaaattcactggaagggagaagggtttttctgagctacagcggatgggaattggattagtcctgtccattctcgcgatggtatctgcagctctagttgagttgaagcgtttagagattgccaggtctgaaggtctcattcatgagaaggctgctgttccaatgagcattctttggcaaataccacaatatttcttggtgggcgctgctgaggtgtttacttgtattggtcaagttgagttcttttacgatcaggccccagatgccatgaggagtttatgtagtgcacttgcacttattacagtctcactgggaaactatataagctccatcatactgacattggtgtcgtacattacaactcagggaggagatcctggatggatccctgacaatctgaatgaaggccatctcgaccggttcttttggttaattgcagggataagctttgtaaatttgatagtttatatgggttgtgctgtcagatacagatataagaaagcctcttga

SEQ ID NO: 347 - protein, 592 aa, Zea mays
MDEAAGLLLQEEGGGGDQEALLLPLPQDVGLYTGDGSVDVKGRPALKGTTGNWKACFFILGNECCERLAYYGIAKNLVTYLKVKLHLGNLEAARHVTTWQGTCYLTPLVGGILADSRWGKYWTIAVFSSVYFIGLAILTLSASVPALQPPSCLRTVCPEASLLQYGIFFGGLYMIALGTGGIKPCVSSFGADQFDDTDQAERAKKGSFFNWFYFCINIGSFISGTMIVWIQDNTGWGIGFAIPTIFMALAISFFFSASNKYRFQKPGGSPLTRVCQVVIAAFRKWHIEVPHDTSLLYEVDGQTSAIEGSRKLEHTNELEFLDRAAVISSADLKSESFTDPWKLCTVTQVEELKILIRMFPIWATTIIFSAVYAQNSSMFIEQGMVLDKRIGSFNIPPASLSTFDVISVIMWVPLYDRILVPLARKFTGREKGFSELQRMGIGLVLSILAMVSAALVELKRLEIARSEGLIHEKAAVPMSILWQIPQYFLVGAAEVFTCIGQVEFFYDQAPDAMRSLCSALALITVSLGNYISSIILTLVSYITTQGGDPGWIPDNLNEGHLDRFFWLIAGISFVNLIVYMGCAVRYRYKKAS

SEQ ID NO: 348 - DNA, 1794 bp, Zea mays
  CDS (1)..(1794)
atggctgaggatgccagaggagagaagaaggatgcctacgcggcggcgccggcgtccaagttgccggcgaagcaacggggagggttcaggagcatgcccttcatcctagcgaatgacttctgcgaccggcttgcgtcggtggggttcacgacgaacctgatctcgtacctcaccctgcagctgcacctgccgctcgtggaggcctccaacatcatcaccaactacaatggcactgctaaccttactccgctcatcggcggtctcatcgccgactcctttgccggccgcttctggaccatcacattcggctccatcatctaccagctcggcatggtctgccttaccctctccgccgcgctcccctcgctgcacccgccatcctgcgccaagcacgctgcagactgccagcgcgcgtcctcctaccagatttccgtgctgtacctgtctctgctctgcacgtcgatcggcaccgggggcacgcgcccctgcaccatggcgttcggcgccgaccagcttgagctgaacgcgcacaggcaccggggcgccaagcccaagtggagtttctttaacctctacttcttcgccgtcgagctcgcgaagctcgcggccgtcaccgccgtggtgtacatccaggacaacgtcgggtggggttggggaatcggcgtgcctaccgtcgccatggtcgccgcggtgatcgccttcgtgtccgggtactcgctctacatcaggatgccacccgggggcagccccctggtccggttggcgcaggtcgctactgcagcatacaagaagcggaaagccgtcgtgccggacccgagcctcctgtacgaggacaaggagctcgacgctggcatctccaccaccggacgccttcttcacaccgaccagctaaagtgcttagacaaggcggctattgtgacggacggcgacgtgctgccgtcgggtcagccgaagctatggcggctgtcgacggtgcaccgcatcgaggagctcaagtcgatcatacgtatgctgccgatctgtgctgccggcatcatcctggtgacatcggcgtcgcacaatcacagcttcgccatccagcaggctcgtaccatggaccgtgacatcacgccacacttcaagatcccgccggcctccatgctcatcttcaccaacttcggtatgctgctgaccctggccttctacgatcgcgtgctcgtccgcgtgctgcgccgcttcactggccgcccgaacggcatcactcacctccagcgcacgggcgtgggactgacgatcgccatgctgtccaacgtggtggccgcggtcgtcgagcggagacgcaagtccgttgccgctgcgagtgggctgctcgacgctcccaaggccaccctgccgatgagcgtcttctggctggtgccgcagtacgccatccatggcatcgccaacgccttcatggacgtcggccgcatggagttcctgtacgaccaggcacccgagagcatgcggagctcagcgacggcgctctactggctgaccttctcgatcgggagctacctcggcacgctgctggtgaccatcgtgcacgacaagacgaagcgaaccgggcaatggctcccggacaaccttaaccgagggaagctagacaactactactggctagtcgtggctctggaggtggtcaacctcgtctacttcttcatctgcgttaagtactacacctttaagccattggagatggtgagcggtgaggaggttgagctctaccaccatggcaatggcaccgacgacgccaagaagcaaggtgtggaagcttag

SEQ ID NO: 349 - protein, 597 aa, Zea mays
MAEDARGEKKDAYAAAPASKLPAKQRGGFRSMPFILANDFCDRLASVGFTTNLISYLTLQLHLPLVEASNIITNYNGTANLTPLIGGLIADSFAGRFWTITFGSIIYQLGMVCLTLSAALPSLHPPSCAKHAADCQRASSYQISVLYLSLLCTSIGTGGTRPCTMAFGADQLELNAHRHRGAKPKWSFFNLYFFAVELAKLAAVTAVVYIQDNVGWGWGIGVPTVAMVAAVIAFVSGYSLYIRMPPGGSPLVRLAQVATAAYKKRKAVVPDPSLLYEDKELDAGISTTGRLLHTDQLKCLDKAAIVTDGDVLPSGQPKLWRLSTVHRIEELKSIIRMLPICAAGIILVTSASHNHSFAIQQARTMDRDITPHFKIPPASMLIFTNFGMLLTLAFYDRVLVRVLRRFTGRPNGITHLQRTGVGLTIAMLSNVVAAVVERRRKSVAAASGLLDAPKATLPMSVFWLVPQYAIHGIANAFMDVGRMEFLYDQAPESMRSSATALYWLTFSIGSYLGTLLVTIVHDKTKRTGQWLPDNLNRGKLDNYYWLVVALEVVNLVYFFICVKYYTFKPLEMVSGEEVELYHHGNGTDDAKKQGVEA

SEQ ID NO: 350 - DNA, 1743 bp, Zea mays
  CDS (1)..(1743)
atgggagaagttgaggacatgtacacccaagacgggaccgtggacatgaaagggaatcccgccgtgaagaagggcaccggcaactggcgcgcctgcccctacatcctcgcgaacgagtgctgcgagaggctggcttactatggcatgagcaccaacctggtgaactacatgaagacccgacttggccaggtgaactccgttgcctccaacaacgtcaccaactggcaagggacgtgctacatcacgccgctcatcggcgccttcttcgccgacgcgtacatggggaggttctggaccatcgccatcttcatgatcatctacattttcggcctggcgctgctgacgatggcgtcatcggtgaaggggctggtgcctacgtcgtgcggcgacaaggacgtgtgccacccgacggacgcgcaggcggcggtggtgttcgtggcgctgtacctcatcgcgctgggcacgggcgggatcaagccgtgcgtgtcctccttcggcgccgaccagttcgacgagaacgacgagcgggagaagaagagcaagagctccttcttcaactggttctacttctccatcaacatcggcgcgctggtggcgtccacggtgctggtgtacgtgcagacgcacgtgggctggggctggggcttcggcatccccgccgtggtcatggccatcgccgtcggcagcttcttcgtgggcacgccgctgtacaggcaccagaagcccgggggcagcccgctgacgcgcatcgcgcaggtgctcgtcgcgtgcgcgcgcaagtggaacgtggccgtgcccgcggacaagtcgcggctgcacgagacggtggacggggagtccggcatcgaggggagccgcaagctggagcactcggagcagctggcgtgcctcgacagggcggccgtggtgacggccgaggacggcgcggagacgagcccgtggcgcctgtgctcggtgacgcaggtggaggagctcaagagcgtgatccggctgctgcccatctgggccagcgggatcgtgttcgcggcggtgtactcgcagatgagcaccatgttcgtgctgcagggcaacacgctggaccagagcatggggccccggttcaagatcccctcggcgacgctgtccatggtggacaccatcagcgtcatcgtctgggtccccgtgtacgaccgcgccatcgtgcccctggtgcgctcctacaccgggaggccgcgcgggttcacgcagctgcagcgcatgggcatcggcctcgtcgtctccatcttctccatggtggcggcgggcgtgctggacatcgtgcggctgcgcgccatcgcgcggcacggcctgtacggcgagaacgacatcgtgcccatctccatcttctggcagataccgcagtacttcatcatcggatgcgcggaggtgttcaccttcgtggggcagctggagttcttctacgaccaggcgcccgacgccatgaggagcatgtgctccgcgctgtcgctcaccaccgtcgcgctcggcaactacctcagcacggtcctggtgaccatcgtcacccacatcaccaccaggcacggccgcatcgggtggatcccggagaacctcaaccgcggccacctcgactacttcttctggctgctcgcagtgctcagcctcctcaacttccttgcctacctcgtcatcgccagctggtacaagtacaagaagacggccgatgattaccctggcgccaaaggggagcacggtacagagcactga

SEQ ID NO: 351 - protein, 580 aa, Zea mays
MGEVEDMYTQDGTVDMKGNPAVKKGTGNWRACPYILANECCERLAYYGMSTNLVNYMKTRLGQVNSVASNNVTNWQGTCYITPLIGAFFADAYMGRFWTIAIFMIIYIFGLALLTMASSVKGLVPTSCGDKDVCHPTDAQAAVVFVALYLIALGTGGIKPCVSSFGADQFDENDEREKKSKSSFFNWFYFSINIGALVASTVLVYVQTHVGWGWGFGIPAVVMAIAVGSFFVGTPLYRHQKPGGSPLTRIAQVLVACARKWNVAVPADKSRLHETVDGESGIEGSRKLEHSEQLACLDRAAVVTAEDGAETSPWRLCSVTQVEELKSVIRLLPIWASGIVFAAVYSQMSTMFVLQGNTLDQSMGPRFKIPSATLSMVDTISVIVWVPVYDRAIVPLVRSYTGRPRGFTQLQRMGIGLVVSIFSMVAAGVLDIVRLRAIARHGLYGENDIVPISIFWQIPQYFIIGCAEVFTFVGQLEFFYDQAPDAMRSMCSALSLTTVALGNYLSTVLVTIVTHITTRHGRIGWIPENLNRGHLDYFFWLLAVLSLLNFLAYLVIASWYKYKKTADDYPGAKGEHGTEH

SEQ ID NO: 352 - DNA, 1791 bp, Zea mays
  CDS (1)..(1791)
atgtctccgcctccccctggcggctccaatggccgccgccaccagcagcagcggcaggaggcggtttcgtccatggaatccggcggcggcgcgtcgggggcggcgaccaagcgcttcacctggaagggcccggtaatcgtcctagtcttcgagctgctggagagcatcgcgttctcgggcgtggctctcaacctggtggtgtacctggccacggtgctgcacgggagcaccgccttcaacgccgcccacgtcgacacctggaacggcaccaccttcatcgtccccgtcatcggcgccttcctcgccgacagctactggggcaagtacaggaccatcctcgcctccatcgtcttctacctcgtgggcctggtgctcctcaccgtgtccgccgcgatcccgtcgctgcggcctgccacggcgtgccagatgggggagtcgtgcgcgccggcgaccaagacgcagttctctgtcttcttcgccgcgctctacctcacctccatcggcacgggaggggtcaagtccgcgctgctccccttcggcgccgagcagtacgtcgacgacgcgggccggccggagcggaagcaggcctttttcagctggttcttcgccgccatcaacctgggcatcttcgtcgccggcacgctcgtgtcgtggctggagcagaacgtgtcgtgggcgctcggcttcggcatcggcacggcctgcctgttcgtggccgcgctcgccttcgcggcgggcacgccctgctacagggtgcagatgccgacgggcagcccgctcaaggacatcatcagggtgttcgtcgccgccttcaggaagcgcgacgtcaggatggaacgggacgagggcgcggcggtgctgctgcacgaagacgaagccgaagacgaagacgaagacggcgatagcgctggacagcagcagcgactggcgcgcaccaagggtctgcggtgccttgacaaggccgcggcgatcatcgtcatggacggagacaaggagcgggagagcgaatggtctctgtgcacggtgagcgaggtggagggcgtgaagatcctggtgcggatgcttcccatctggatgacgtgcgtgctgtacgcggcgtcgctggggcagatgaccaccaccttcatccagcaggggatggccatggacacgcggctgggcggccggttcaaggtgcccgtggcgtcgttggtgtccgtggaggtggtgttcatgctcctgtgggtggcgctgcacgacgccgccatcatcccggcggcccggcggctgacggggcgccccggtgggctgacgcatgtgcagcgcatgggcgtggggcggttcctggtggtgctggccgtggggacggtcgcgcttgtcgagaggcgcctgctccgctccatccacggcggtagctgcccgatgagcatcgtgtggcaggtgccgcagttcgtgctggtggcgggctccgacgttttctgcggcatcgcgcagctggagttcttctacggggaggcccccgccgcgatgcgcagcatctgctcggccttctccttcctggcgctgtcgctggggttctacgtcaactcgctggtggtgacgctggtggcggccgtgacgaagcggcccgggtggctggcgacggacctcgacaccggccacctggactactacttctggctctggaccatcatcagcgtcgccaacctgctgctctacatggtgctcgccgcccggtacacgcccaagcaggtcgccgctgccgtggtggagccgatgcgtcccagcaacagtggcggcagcgacgaatga

SEQ ID NO: 353 - protein, 596 aa, Zea mays
MSPPPPGGSNGRRHQQQRQEAVSSMESGGGASGAATKRFTWKGPVIVLVFELLESIAFSGVALNLVVYLATVLHGSTAFNAAHVDTWNGTTFIVPVIGAFLADSYWGKYRTILASIVFYLVGLVLLTVSAAIPSLRPATACQMGESCAPATKTQFSVFFAALYLTSIGTGGVKSALLPFGAEQYVDDAGRPERKQAFFSWFFAAINLGIFVAGTLVSWLEQNVSWALGFGIGTACLFVAALAFAAGTPCYRVQMPTGSPLKDIIRVFVAAFRKRDVRMERDEGAAVLLHEDEAEDEDEDGDSAGQQQRLARTKGLRCLDKAAAIIVMDGDKERESEWSLCTVSEVEGVKILVRMLPIWMTCVLYAASLGQMTTTFIQQGMAMDTRLGGRFKVPVASLVSVEVVFMLLWVALHDAAIIPAARRLTGRPGGLTHVQRMGVGRFLVVLAVGTVALVERRLLRSIHGGSCPMSIVWQVPQFVLVAGSDVFCGIAQLEFFYGEAPAAMRSICSAFSFLALSLGFYVNSLVVTLVAAVTKRPGWLATDLDTGHLDYYFWLWTIISVANLLLYMVLAARYTPKQVAAAVVEPMRPSNSGGSDE

SEQ ID NO: 354 - DNA, 1725 bp, Zea mays
  CDS (1)..(1725)
atggaggcagctgcagatgaggagaggccactgattcagtacctggctccagaggatgatgaagcttcctcacgatacactagcgacggaacgctcgatatcaacaagcagcgtgctctgaagaagagcaccgggaactggagagcatgcttcatgattctgggtaccgagttcgccgaatgcctggcattttacgcgaccgcaaagaacctggtcacctacctcacggctgagcttggtgagaccaacatcgatgccgcgacgaacgtgtccacctggattggcagctgctacctcacgccgctcatcggcgccttcttggccgacacgtactggggaagatacaagacgatgatagtcttcctcttgctctacatcgttgggatgcttactctgacagcgtcggcgtggctccccttggccatggaggacgactcacctgacaacagcggacttcggcgtgccacagcgtacctggggctctacctcgtttccctaggcacaggaggcatcaagccctgcacggcggccctcggggccgaccagttcgacggcggcgacgcggcggagcgggtcaccaaggcctccttcttcaactggtactacttctgcaccaacatcggctccctgctgtcggggaccgtgctcgtctgggtgcaggaaaatattggatggggagtcgggtttacggtgcagacggtgttcatgctgttcggcctcgccgtgttcgtcgccggtcgcaaggtgtataggtacaagaagctgggcgggagccctctcacaagggtagcccaggtggttgtcgcagctgtgaggaactgccatctcgtgctgcctgatgatacgtcagccctgtaccacgataagcttctaccaactgaaccaaatttcaggattgagtctgccagacaattcagattctttgacaaggctgccataatcaccggcgagaagggtgcagcagcgccgacgagcccgtggagactgtgcacggtgtcccaggtggaggagctgaagatgctgctccggttgctgccggtctgggcatccatggtgctcttcttcgccgtcagtgcgcagacggtaaccacgttcattgagcaggctagggtgatggacaaccgcatcggcccgttcaccattcctccggcgtcgatagcgaccttcgacgtgatcagcgtcatggtctgcgtccccgtctacgacgccgtgctggtgcctctggcccggcgtgccactggcaacgaccgcggcctgtcgcagctgcaccggctctccatcgggatcgcgctgtccgtggtcgtcatggtgtacgcggcgctgctcgagggcaggcgcctggccctcgcgcgggccaacatgcccgccatgaacatcgcgtggcaggcacccatgttcgccgtgcacggcgcggcggcggtcttcgccaccgtcggcgtgctcgagttcttctacgaccagtcgccggacgggatgaagagcctcggcaacgcgctcgcgctgctctccatggcggccgggagctatttcaactcgcttgcgctcagcgctgtcgggtcgatcacggcgcgcggcggggaacgcgggtggctcccggacgacctgaacaagggtcatatggactatttcttctggatgatggccgctcttggaacgctcaacctgctgcacttcttgcactactgcaacagacgatacagaggcaacaacaacaacacttcttga

SEQ ID NO: 355 - protein, 574 aa, Zea mays
MEAAADEERPLIQYLAPEDDEASSRYTSDGTLDINKQRALKKSTGNWRACFMILGTEFAECLAFYATAKNLVTYLTAELGETNIDAATNVSTWIGSCYLTPLIGAFLADTYWGRYKTMIVFLLLYIVGMLTLTASAWLPLAMEDDSPDNSGLRRATAYLGLYLVSLGTGGIKPCTAALGADQFDGGDAAERVTKASFFNWYYFCTNIGSLLSGTVLVWVQENIGWGVGFTVQTVFMLFGLAVFVAGRKVYRYKKLGGSPLTRVAQVVVAAVRNCHLVLPDDTSALYHDKLLPTEPNFRIESARQFRFFDKAAIITGEKGAAAPTSPWRLCTVSQVEELKMLLRLLPVWASMVLFFAVSAQTVTTFIEQARVMDNRIGPFTIPPASIATFDVISVMVCVPVYDAVLVPLARRATGNDRGLSQLHRLSIGIALSVVVMVYAALLEGRRLALARANMPAMNIAWQAPMFAVHGAAAVFATVGVLEFFYDQSPDGMKSLGNALALLSMAAGSYFNSLALSAVGSITARGGERGWLPDDLNKGHMDYFFWMMAALGTLNLLHFLHYCNRRYRGNNNNTS

SEQ ID NO: 356 - DNA, 2186 bp, Glycine max
  CDS (100)..(1935)
agtcattgagttgagattgaagcctccgtccatgttcttccttccgaaggggcatcaattaacatccctcgtttcaggtagcacttggagcgtatcatcatgaacacaattggagaaagaatgacaaagagagagacatcggagaatgatgaggaggaaagtttattgaagaatgagaatagcggaacagatgatgactctaagattaactacagagggtggaaggtcatgcccttcattataggaaatgagatttttgagaagctaggagccattggcactttatccaatctcttggtctatctcactacggtattcaacttggaaaacatcatggctacaaatattatcaacatctttaatggcagcaccaactttgctacattgctaggagcttttctctctgatgccttttttggtcgctacaagatactggcattctgcacaatggcttcctttgtgggtttgtttgcaatacaactgacagcagcagttgagaagctgcatccacctcactgtgaagagtccaccatatgccaggggccaacagaggggcagatgacatttctaaagacaggtttaggtttattgatggtaggagctgcagggatccgaccatgtaacttagcatttggtgctgatcaatttaatcctaacacagattcgggaaaaaaggggatcgctagcttctttaattggtactttttcactttcactgttgctcagatgatatccttaacaattattgtctatatacagtcaaatgtaagttgggcagtgggtctgggaattccttctgctttgatgtttgtatcttctataatcttcttcatggggtccaaactgtatgtgaaagttaaaccaagtggtagccctataactagtatagtacaagttatagtggttgcaacaaagaaaaggaggctgaagcttcctgaatatcaatatccttccctcttcaactatgtggctcccaagtcagtgaattctaaacttccctatacatatcaattcaggttccttgacaaagcagcaatcatgactccccaagatcaaataaatcccaatggatctgctactgatccctggaatctttgcagtatgcagcaagtggaagaggttaaatgcttgttgagagtgttacccatatgggtttcaggcattttgtactttgttgttatagtccaacagcacactattttagtgttccaagcccttctatctgacaggcgtattgggcaaagcgggttcttgatcccaggagcatcatactacgtctttctgatgattagtgtggcaatttggttacccgtctacgaccgaaaagtcgtgcctttactccaaaagctcaccagaaaagagggtggcatcacactccttcagaggatgggcattggcatatttttctctatactcagcatgctagtgtctgctagggttgaacagcaccgtagaactctggctctgattaatcctctaggagtggaaacaagaaaaggtgcaatctcatcaatgtcaggtctgtggctgattcctcagctgtcattagctggacttgctgaagcattcatgtctgttgcccaagttgagttttactacaaacaatttcctgagaacatgagaagcattgcaggttctctttactactgtggccatgcagggtcaagttatttgagtagtgtgcttattgcagttatccaccaaatcactgccaaatctgaaactgggaattggttaccggaggatctgaacaaggggagattggataacttctattcgctcattgctgctctagaaattattaatttaggctactttgtgttatgtgcaaggtggtttaggtacaaaggcacaggcagcagttccattgaactcgaaaaagctacaaaacaatcggaaagaagtgctaatggtgttaatgattcgaatctatagctattgcatagaaatgggctactacaatttttcatcaagtggagccacaactagcaaaggttaaaaatcaaattgagtatagcaacaaaagcacagtctctgccttttcaattagatagatacttcatgtgtagatgtatgatgagatgaagtgcattattcttaggataggatgcctgcatccaaaacgtttgtcttaaagcacttaatgatagtgaaagaaaaattatagatcgaaaaaaaaaaaaaaa

SEQ ID NO: 357 - protein, 611 aa, Glycine max
MNTIGERMTKRETSENDEEESLLKNENSGTDDDSKINYRGWKVMPFIIGNEIFEKLGAIGTLSNLLVYLTTVFNLENIMATNIINIFNGSTNFATLLGAFLSDAFFGRYKILAFCTMASFVGLFAIQLTAAVEKLHPPHCEESTICQGPTEGQMTFLKTGLGLLMVGAAGIRPCNLAFGADQFNPNTDSGKKGIASFFNWYFFTFTVAQMISLTIIVYIQSNVSWAVGLGIPSALMFVSSIIFFMGSKLYVKVKPSGSPITSIVQVIVVATKKRRLKLPEYQYPSLFNYVAPKSVNSKLPYTYQFRFLDKAAIMTPQDQINPNGSATDPWNLCSMQQVEEVKCLLRVLPIWVSGILYFVVIVQQHTILVFQALLSDRRIGQSGFLIPGASYYVFLMISVAIWLPVYDRKVVPLLQKLTRKEGGITLLQRMGIGIFFSILSMLVSARVEQHRRTLALINPLGVETRKGAISSMSGLWLIPQLSLAGLAEAFMSVAQVEFYYKQFPENMRSIAGSLYYCGHAGSSYLSSVLIAVIHQITAKSETGNWLPEDLNKGRLDNFYSLIAALEIINLGYFVLCARWFRYKGTGSSSIELEKATKQSERSANGVNDSNL

SEQ ID NO: 358 - DNA, 1707 bp, Zea mays
  CDS (1)..(1707)
atggacgcggagaccggagatacccggtctcccctgctgccgcatccccctcccagccagacgcaggtttcctcagcgaatcagcactataacaaacccttcagctggaagggcccagccattattttggccttcgaattcttggagagcattgcttactctggtatagcactcaacctggtcgtgtaccttggaaccgtcctccatggaaccaccgcctccaatgcagcgaacgtcgatgcgtggaacggcgccacgtttcttacgccggtccttggagcctttcttgctgatacatactgggggaagtacaagaccgcagctatctccataatattctacgttgttggcctgctcataattaccacctctgccgtcataccgtccctacggcctgcctcgtgtgaaggcggttcatgcccacctgcaacagggtttcagtattttgtgctctttggttcattgtacctcatctccattggtacggggggcgtcaagtcagctttacttccattgggagcagatcagtacaatgatgcgaacgccgaagagagcaaaagcaagcaactgttcttcagttggttcttcatggctgtcaaccttggagtgttcatctctggcactgttcttgtctggatacagcaaaatgtcgcttggtctcttggattcggcatctcctcgatatgccttgttatcgccgcagttgcctttttggttggaacaccgctttacagggttcaacttccaactgggagtccactcaagagtatagtcatggtgtttgttgcctcttataagaagagaggagtggcggttcctgctgatagcacactgttgtttgaagggaatgacgctgaatcaagcagcatagtgccgaacaaaattgaacacactgatgaattcaggtgcttagataaggctgctgtcgttgtagaggaccaagagatgaaggacagccatcgcccatggctactatgtacggtaacccaggtggaggaagtgaagattctgatccggatgcttccgatatggttcacctgtgtcttctattcggctgcaatgagccagactgctaccactttcgtccagcaggggaacgcgatgaacactaagatcgggtccttctcggtgccggcggcctctatgaactccgccgaggtgatcttcatgctcgtctgggttgtgttccaggacagcgtcgtcatcccgatagccaggaggtacacggggaacccgatggggctgacgctgctgcagcggatgggcgtcgggcggttgctggcgatcccatctctggcggccgccgcactggtggagacgtggaggctgcgcagcgtgaaggccgggcataacctgagcatcgggtggcagctcccgcagttcgtgatcctggcctgctccgacgtgttctgcggcatcgcgcagctggagttcttctacgcggaggcgcctgcgtccatgcgcagcctgtgctcggcgttccagtttctggccatgtcgctggcgtactacgtgaacacgctggtggtcgcattggtggcgtccgtgaccacggcctggggcggcaagggctggctccccgctgacctcaacgacggccacctggactactacttctggctgtggacggggatcagtgtggtgaactacgtcgtgtacacggcatttgcaaggcgttatacggtcaagaaggttgtcggtcagtaa

SEQ ID NO: 359 - protein, 568 aa, Zea mays
MDAETGDTRSPLLPHPPPSQTQVSSANQHYNKPFSWKGPAIILAFEFLESIAYSGIALNLVVYLGTVLHGTTASNAANVDAWNGATFLTPVLGAFLADTYWGKYKTAAISIIFYVVGLLIITTSAVIPSLRPASCEGGSCPPATGFQYFVLFGSLYLISIGTGGVKSALLPLGADQYNDANAEESKSKQLFFSWFFMAVNLGVFISGTVLVWIQQNVAWSLGFGISSICLVIAAVAFLVGTPLYRVQLPTGSPLKSIVMVFVASYKKRGVAVPADSTLLFEGNDAESSSIVPNKIEHTDEFRCLDKAAVVVEDQEMKDSHRPWLLCTVTQVEEVKILIRMLPIWFTCVFYSAAMSQTATTFVQQGNAMNTKIGSFSVPAASMNSAEVIFMLVWVVFQDSVVIPIARRYTGNPMGLTLLQRMGVGRLLAIPSLAAAALVETWRLRSVKAGHNLSIGWQLPQFVILACSDVFCGIAQLEFFYAEAPASMRSLCSAFQFLAMSLAYYVNTLVVALVASVTTAWGGKGWLPADLNDGHLDYYFWLWTGISVVNYVVYTAFARRYTVKKVVGQ

SEQ ID NO: 360 - DNA, 1731 bp, Glycine max
  CDS (1)..(1731)
atggagcagaaagaaaatcatgctagaaggaaaaagggagggctcatcacaatgcccttcatctttggtaatgaggtttgtgagaagctggctgtggtaggtttcaacacaaacatgattagctacttgacaacacagcttcacatgccattgaccaaagcagctaacaccctcactaactttggtggaactgcaagcttgacaccattgcttggtgctttcattgctgattcttatgccggaaagttctggactgtcacccttgcttccattatataccagatagggatgattagtttgaccctatcggcagtgctaccacagtttaggccacctccctgcaagggtgaagaggtgtgccagcaagcaagtgcaggacagctggcaatcctctacatctcactcctcctcggggcactcgggtcgggtgggatccgaccctgcatcgtggcgttcggggcggatcagttcgacgagtctgatcccaagcagacaacaaggacatggacctacttcaactggtactactttgtcatgggtgtagcaattcttgtggctgtgactgttttggtgtatattcaggacaatattggttggggaattggccttggaatccctaccattgcaatgttcctctcaattattgcattcattgtcggatacccgctttaccgtaacttgaacccgtccgggagcccgtttacccggttagtgcaagtggctgtggctgcatttcgtaagagaaaggtcccaaatgtgtcacaccctagtttactctaccaaaatgatgaactagatgcctctatttctatgggagggaagcttcttcacagtggacagatgaaatttttggacaaggcagcaatagttacagaagaagatgacaacaaaacacctaacttatggagattaaacacaattcatagagtggaggaattgaagtccataatcagaatgggtccaatatgggcatcaggaattctcctcatcacagcttatgcccaacaaaacacattctccctccaacaagccaagaccatggacagacacctaaccaaaacctttcaaatcccagctgggtccatgtctgtcttcaccatccttaccatgctcaccaccactgccttctatgaccgagtcttcatcaaagtggctcgtaggttcaccgggctggaccgtggcataagcttcctccacagaatgggcattgggtttgtgatctcaaccttagccacattggttgctgggtttgttgaaatgaaaagaaagaaggcagctttggcccatgggctttttgaccacccacatgccataatcccaatctcagtgttctggcttgtccctcaatacagccttcatggaatggctgaggcctttatgtcaattggacacttggagtttttctatgaccaggcccctgagagtatgaggagcactgccatggcattattttggactgctatcgctgctgggaactatgtgagtaccattatggttactttggtccacaagttcagtgctgggtctaatgggtcaaattggctccctgacaacaacctcaacaaagggaagttggagtacttttactggcttatcaccatattgcagtttctcaatcttatttactacttggtttgtgccaaattgtacacctacaagccaattcaggtccatgacaaaggggatagcaattcagaagggaaccaaattgagctctctaccacggtttaa

SEQ ID NO: 361 - protein, 576 aa, Glycine max; identical to SEQ ID NO: 233

SEQ ID NO: 362 - DNA, 1764 bp, Glycine max
  CDS (1)..(1764)
atggagcaggaaatggagaagagaaagggaggtagaattgaagaaagtgatgaagagaaatgggtccatgatgcatctgtggattacaaggaaagaatccctctccgtgcttccacgggtgtatggaaagcttcactttttgcccttgcaattgaatttagggaaaggatagcccactttgggatagccactaatcttatcatgtacctgactaaagtaatgcatgaagatctcaaaacagcgaccaagaatgtaaactactgggtaggagcaacaactttgatgcctctaattggaggatttgttgctgatgcctacactggtcgatttcgtatggtcctcttttcttccctcttatacctcaagggattaagcctcttgaccatgtctcaattcattccaagtctaaaaccatgcaacaatgagatatgccattggccaaggaaggttcatgaagtggttttattccttgccctttactgtgtcgccttgggaactggaggattcaaaccgtgcttacaaagctttggagcagatcaatttgatgatgaccaccttgaagaaaggaagaagaagatgtcattcttcaactggtggaattttacactttgcacggcaatgctgcttggggcaacagtgattgtttatgttcaagactttgtcagctggggagtatcttatctcatcctcagcatgttcatggctctcactatcattgctttctatgaggggaagcgtttttacaggtacaggagcacagaaggtaaccctttcatgctaattctacaagtactaattgcagcaataaggaaaagcaacttgtcctgtccttcaaatcccgattcattgtatgaattcccaaagtcagagaagtcacaaggaaggcttctaagccatacttgcaggctcaggtttcttgacaaggctgcaatagttgaagggaagtatactgagcatagagaccagaatccatggagattagcaacagtgacaagagtggaggagacaaagcttattctgaatgttattcccatatggctaacttcattaataattggtatatgtatagcgcaaggctcgacactctttgtcaatcaagcagcttctatgaacttaaagataatcaacagcttcaaaatcccaccagcttccatgacatctgtttcagctattagcccaataatagctatcccaatatatgataagattatagttccaattatgaggaaagtcaaaggtaacgaaaggggcatcagcgtcctttggagggttggcattggcttagcattcttagtcatagccatggtggttgctgccttagtagaaacaaagagattaagaatggttgaacatgatgaaacaatgagtgtgttgtggttgataccccaatacttgatccttggaattggagcagattcattgtctctaattggtttgcaagagtatttctatgacgaagttcctgactcaatgagaagcataggaatggccttgtatcttagtgtacttggagtaggatttttcttaagtagctttttaatcatcattgtggaacatgtcacggggaaaactggcaaaagttggattggaaaggacataaattcaagccgtttggataagttttattggatgctagctgtcataaatgcttttgttctgtgtgtctttctcttggtgtccaaaaggtacacctataagactgtacagagaagagctatggaaactgattcttgtaagagtgatggggttgagatggtggcttga

SEQ ID NO: 363 - protein, 587 aa, Glycine max
MEQEMEKRKGGRIEESDEEKWVHDASVDYKERIPLRASTGVWKASLFALAIEFRERIAHFGIATNLIMYLTKVMHEDLKTATKNVNYWVGATTLMPLIGGFVADAYTGRFRMVLFSSLLYLKGLSLLTMSQFIPSLKPCNNEICHWPRKVHEVVLFLALYCVALGTGGFKPCLQSFGADQFDDDHLEERKKKMSFFNWWNFTLCTAMLLGATVIVYVQDFVSWGVSYLILSMFMALTIIAFYEGKRFYRYRSTEGNPFMLILQVLIAAIRKSNLSCPSNPDSLYEFPKSEKSQGRLLSHTCRLRFLDKAAIVEGKYTEHRDQNPWRLATVTRVEETKLILNVIPIWLTSLIIGICIAQGSTLFVNQAASMNLKIINSFKIPPASMTSVSAISPIIAIPIYDKIIVPIMRKVKGNERGISVLWRVGIGLAFLVIAMVVAALVETKRLRMVEHDETMSVLWLIPQYLILGIGADSLSLIGLQEYFYDEVPDSMRSIGMALYLSVLGVGFFLSSFLIIIVEHVTGKTGKSWIGKDINSSRLDKFYWMLAVINAFVLCVFLLVSKRYTYKTVQRRAMETDSCKSDGVEMVA

SEQ ID NO: 364 - DNA, 1779 bp, Glycine max
  CDS (1)..(1779)
atggagcaagaaatggagaagaggaaggaaggtacaagtgaagaagagaaatgggtgcatgatgcatctgtggattataaaggaagacttcctctccgtgcttccacaggcgtatggaaagcgtcgctttttgtccttgcaattgaatttagtgaaaggatatgccactttgggatagccactaatcttatcatgtacctgactaaagtaatgcatgaagatctcaaaacagcgaccaagaatgtaaactactgggtaggagcaacaactttgatgcctctaattggaggatttgttgctgatgcctacactggtcgatttcgtatggtcctcttttcttccctcttatacctcaagggattaagcctcttgaccatgtctcaattcattccaagtctaaaaccatgcaacaatgagatatgccattggccaaggaaggttcatgaagtggttttattccttgccctttactgtgtcgccttgggaactggaggattcaaaccgtgcttacaaagctttggagcagatcaatttgatgatgaccaccttgaagaaaggaagaagaagatgtcattcttcaactggtggaattttacactttgcacggcaatgctgcttggggcaacagtgattgtttatgttcaagactttgtcagctggggagtatcttatctcatcctcagcatgttcatggctctcactatcattgctttctatgaggggaagcgtttttacaggtacaggagcacagaaggtaaccctttcatgctaattctacaagtactaattgcagcaataaggaaaagcaacttgtcctgtccttcaaatcccgattcattgtatgaattcccaaagtcagagaagtcacaaggaaggcttctaagccatacttgcaggctcaggtttcttgacaaggctgcaatagttgaagggaagtatactgagcatagagaccagaatccatggagattagcaacagtgacaagagtggaggagacaaagcttattctgaatgttattcccatatggctaacttcattaataattggtatatgtatagcgcaaggctcgacactctttgtcaatcaagcagcttctatgaacttaaagataatcaacagcttcaaaatcccaccagcttccatgacatctgtttcagctattagcccaataatagctatcccaatatatgataagattatagttccaattatgaggaaagtcaaaggtaacgaaaggggcatcagcgtcctttggagggttggcattggcttagcattcttagtcatagccatggtggttgctgccttagtagaaacaaagagattaagaatggttgaacatgatgaagtgataacagtaggggggactaggcatgagacaatgagtgtgttgtggttgataccccaatacttgatccttggaattggagcagattcattgtctctaattggtttgcaagagtatttctatgaccaagttcctgactcagtgagaagcttaggagtgggtttgtatcttagtgtggttggagtaggattcttcttaagcagttttctgatcatcactgtggatcatgtcacggggaagaatggaaaaagttggattgcgaaggatataaattcaagtcgtctagataaattttattggatgttggctgtcataaatgctttcaatttgtgtttctttctattcttggcaaaggggtacacttataaaaccgtgcaaaggaaaactagggaaatttgtagtgatggggtggagacaatggaatcatga

SEQ ID NO: 365 - protein, 592 aa, Glycine max
MEQEMEKRKEGTSEEEKWVHDASVDYKGRLPLRASTGVWKASLFVLAIEFSERICHFGIATNLIMYLTKVMHEDLKTATKNVNYWVGATTLMPLIGGFVADAYTGRFRMVLFSSLLYLKGLSLLTMSQFIPSLKPCNNEICHWPRKVHEVVLFLALYCVALGTGGFKPCLQSFGADQFDDDHLEERKKKMSFFNWWNFTLCTAMLLGATVIVYVQDFVSWGVSYLILSMFMALTIIAFYEGKRFYRYRSTEGNPFMLILQVLIAAIRKSNLSCPSNPDSLYEFPKSEKSQGRLLSHTCRLRFLDKAAIVEGKYTEHRDQNPWRLATVTRVEETKLILNVIPIWLTSLIIGICIAQGSTLFVNQAASMNLKIINSFKIPPASMTSVSAISPIIAIPIYDKIIVPIMRKVKGNERGISVLWRVGIGLAFLVIAMVVAALVETKRLRMVEHDEVITVGGTRHETMSVLWLIPQYLILGIGADSLSLIGLQEYFYDQVPDSVRSLGVGLYLSVVGVGFFLSSFLIITVDHVTGKNGKSWIAKDINSSRLDKFYWMLAVINAFNLCFFLFLAKGYTYKTVQRKTREICSDGVETMES

SEQ ID NO: 366 - DNA, 1761 bp, Glycine max; identical to SEQ ID NO: 75
  CDS (1)..(1761)

SEQ ID NO: 367 - protein, 586 aa, Glycine max; identical to SEQ ID NO: 76

SEQ ID NO: 368 - DNA, 1758 bp, Glycine max; identical to SEQ ID NO: 77
  CDS (1)..(1758)

SEQ ID NO: 369 - protein, 585 aa, Glycine max; identical to SEQ ID NO: 78

SEQ ID NO: 370 - DNA, 1716 bp, Glycine max
  CDS (1)..(1716)
atggcagaggatgatggttacacgaaagatggaacagtcgattactgtggaaatccagctaataaaaaggaaactggaacctggaaagcctgcccctatatcttaggaaacgaatgttgtgagagattggcttattatgggatgagcacaaacctggtgctttatttcaagaaccggctaaatcagcatagtgctactgcttccaagaatgtctctaattggagtggaacttgctatatcacaccattgattggggcatatttggctgattcctaccttggaagatattggacaattgctgttttttcaataatttatgctattggaatgacactcttgacattgtctgcatcagttcctggcataaaaccaacatgtcatggacatggagatgaaaattgtcgtgctactactctagagagtgcagtgtgcttcctagctctttaccttattgctcttggcaccggtggcattaagccttgtgtctcatcctatggagcagatcagtttgatgacactgactcggctgagaaggaacgcagttctttcttcaattggttctatttttcaatcaacattggcgctcttattgcatcttctctattggtttggatacaagataatgtgggttggggatggggctttggtattcctgctgtagccatggcaattgctgtggtgagtttcttttcaggcactaggttgtataggaatcagaagcctggaggcagtgccatcactagaatctgtcaggtggtaatggcatccataagaaaatacaatgttgaagtacctgctgacgagtcacttttatatgagactgctgaaactgaatctgctataaaaggaagccgaaagcttgaccacacaaatgagctaagattttttgacaaagcaacagtgctagcacagtcagataaagtgaaggaatcaacaaacccttggagactttgcactgtaactcaagtggaagagctgaaatccattttaagaatacttcctgtatgggcaaccggcatcatattttccactgtctatggtcaaatgagcaccttatttgtgttgcaaggacaaaccatggacactcgtgttggcaactccactttcaaaatcccaccagcttcactgtccatctttgacaccctcagtgtcatattttgggtcccagtgtatgacaggatcattgtgccaattgctacaaagttcactgggaacaaaaatggcctaactcagctccagagaatgggaattggcctcttcatatccatattttccatggtagctgcagcaatattggagctcatacggcttagaatggtgaggaggcacaactactatcaacttgaggagataccaatgacaatattttggcaggttcctcaatatttcatcataggctgtgcagaagtcttctatttcattggtcagttggagttcttctatgagcaagcccctgatgctatgcgaagcttttgttctgctctctcacttaccactgttgcgcttggacagtacttgagctctctgcttgtgacaattgtgacaaagatcagcactaggaatggaagtccagggtggatacctgataatctaaactttggtcacatagattatttcttctggctattggcattgctaagtgtagtgaacttgatagcattccttgtggtgtctatgttgtatacatataagagacctgtgggaactctgcgctga

SEQ ID NO: 371 - protein, 571 aa, Glycine max
MAEDDGYTKDGTVDYCGNPANKKETGTWKACPYILGNECCERLAYYGMSTNLVLYFKNRLNQHSATASKNVSNWSGTCYITPLIGAYLADSYLGRYWTIAVFSIIYAIGMTLLTLSASVPGIKPTCHGHGDENCRATTLESAVCFLALYLIALGTGGIKPCVSSYGADQFDDTDSAEKERSSFFNWFYFSINIGALIASSLLVWIQDNVGWGWGFGIPAVAMAIAVVSFFSGTRLYRNQKPGGSAITRICQVVMASIRKYNVEVPADESLLYETAETESAIKGSRKLDHTNELRFFDKATVLAQSDKVKESTNPWRLCTVTQVEELKSILRILPVWATGIIFSTVYGQMSTLFVLQGQTMDTRVGNSTFKIPPASLSIFDTLSVIFWVPVYDRIIVPIATKFTGNKNGLTQLQRMGIGLFISIFSMVAAAILELIRLRMVRRHNYYQLEEIPMTIFWQVPQYFIIGCAEVFYFIGQLEFFYEQAPDAMRSFCSALSLTTVALGQYLSSLLVTIVTKISTRNGSPGWIPDNLNFGHIDYFFWLLALLSVVNLIAFLVVSMLYTYKRPVGTLR

SEQ ID NO: 372 - DNA, 1761 bp, Glycine max; identical to SEQ ID NO: 79
  CDS (1)..(1761)

SEQ ID NO: 373 - protein, 586 aa, Glycine max; identical to SEQ ID NO: 30

SEQ ID NO: 374 - DNA, 1692 bp, Glycine max
  CDS (1)..(1692)
atggccattgacgacctctgcggcgattctgaagctgaaactccgctgctatcggagacgctatacggcgtcgtcaacttcaagggcctccccgtcctacgatctacctctggtggttggaaagctgctgccttcattataactgtggaagtggctgagagatttgcttactatggaatcaactcgaacctgataaattatttgacggggccacttggtcaatccacggtaacggcagcagagaacgtcaacctctggtctggaacagcgtcattacttcctcttctcggcgcttttcttgctgattcttttcttggtcgttaccgcaccatcgttttagcttcccttatttatgttctgggactgagcctgctgacgttttcgactatacttcctgtgacaacctcggacggcgaagttgctcgtccccaattaatattcttcttcttttctctatatctcgttgcacttgcacaaggtggacataagccttgtgttcaggcttttggagctgatcagtttgatgtgaacgatcctgaggaatgcaaggccagaagctcctttttcaattggtggtattttgccttcagtgctggtctttttgtgactcttttcatcttgaactatgtccaggataatgtcggttgggttcttggatttggaatcccttgcattgcaatgctaactgcattggttattttcttaattggaacttggacttaccggtttagcattcggagggaggaacgaggcccttttttgaggattggtagggtgtttattgttgcagtgaacaattggcgaattaccccttcagctgtcacttctgaagaggaagcttgtggcactctgccttgccatggttctgatcaatttagtttcctgaacaaagcattaattgcatcaaacggttcaaaggaagagggggaagtttgtagtgctgctgaagttgaagaagcaaaggcagtcctcaggcttgttccaatatgggctacatgtttaatttttgctattgtgtttgctcagtcttctactttctttacaaaacaaggtgttacgatggacagggaaattttgcctgggttttatgtaccccctgcttctcttcaatccattatcagcctctccattgttctttttattcctatctatgaccgcattattgttcccgtagctagagcttttactggcaaaccctctggcatcacaatgctgcagagaattggaactggaatgcttctttctgcaatttctatggtaattgcagcttttgtggagatgaaaagactcaaagtggctcgtgactgtgggctaattgacatgcctaatgtgacaattccaatgagcatctggtggttagttcctcaatatgccttgtttggaattgctgatgtctttgcaatggtgggtctgcaagagtttttctatgatcaagtcccacaggaattaagaagtgtgggtctttctctctatctaagtatttttggggtcgggagctttctgagtggctttctcatctctgctattgaaaatgtcacgggtaaagataatcgtcatagctggttttctagtaatctcaatcgtgcgcatcttgattatttctatgcccttctagctgctctcagtgcagtggagttatctgtcttctggttcttttccaaatcttatgtttacaagacaagaagcacatag

SEQ ID NO: 375 - protein, 563 aa, Glycine max; identical to SEQ ID NO: 203

SEQ ID NO: 376 - DNA, 1782 bp, Glycine max
  CDS (1)..(1782)
atggaattagaacaaaaccagagatgggaaggctatgtgaactggaggaacaagcctgctctcagtggctgcaatggtggcatgcttgctgcctcctttgttttagtggttgagatattggagaatctggcatttctagccaatgcaagcaatttggtgctgtatctgaggcagtacatgcacatgtccccttcaaaatctgccaacaatgtcacaaatttcatgggaactgccttcctccttgcccttcttggaggtttcttatctgatgctttcttcaccacttatcacatctacctgataagtgcagtcattgaattcctgggattgattgttctcactgcacaagctcgtgtgccatcactgaagccaccagcatgtgacgcagccactccatgcaacgaagttagtggtggaaaagcagcaatgctgtttgctgggctctatttggtggcacttggagttgggggagttaaggggtcattgccttcacatggtgctgagcaatttgatgacaacactccatctggaagaaggcaaagatcaaccttcttcaactactttgtcttttgcttgtcatgtggtgcccttattgcagtcacatttgtggtgtgggttgaagacaacaaagggtgggaatggggctttggaatctctactatagccatatttgtgtccatcccagtgttcttggcaggttctactacttataggagcaagatcccttctggaagtccacttacaaccattctgaaggtactagttgctgcttcacttaacagttgcttcaacagtagaaattccagcagtgcagtggtgaacatgacttcaagcccttcaaatccacactcaggtagtagaaaacaacaagcagggaaagaagcttctaatacaacaaacaaggaacctgaagccctaacaaacacactcaaattcctcaacaaagcagctgatcagaacaacaacaaccctatctattcatcgatagaatgcacagtggagcaagtagaggatgtgaagatagtgcttaaagtgctccccatattcgcatgcaccatcatgctaaactgttgcctagctcagctctccactttctcagttgaacaagccgcaacaatggacaccaaactcggttccctgaaggttccaccagcctctttaccaatcttcccagtgctcttcatcatggtccttgcaccaatctatgaccacatcatcacaccctttgcaagaagagtcaccaagacagaaatgggaatcacacacctccagagaatcggaattggactagtcctttcgatagtggcgatggcggtggcggcggttgttgaagtgaaaaggaaaagggtcgcaatggaaacacacacaaataataataacagccttctaggtcatgatgcaaccaagcctttacctatcacattcctttggattgcttttcagtacttgttccttggttctgctgatctcttcaccctagctgggttattggagtttttcttcacagaagcaccttctagcatgaggtctttggctacatcattatcttgggcctctttggctgtagggtattacttaagttcggcaattgtgtcaattgtaaatagtgtcactggtaacacctcacatagaccatggctctctggggcaaaccttaaccactaccacctagagaggttttactggctcatgtgtgtgctgagtgcgttgaatttcttgcattacttgttttgggctatcagatacaagtatagagggacaggaactacaaacaacaactga

SEQ ID NO: 377 - protein, 593 aa, Glycine max
MELEQNQRWEGYVNWRNKPALSGCNGGMLAASFVLVVEILENLAFLANASNLVLYLRQYMHMSPSKSANNVTNFMGTAFLLALLGGFLSDAFFTTYHIYLISAVIEFLGLIVLTAQARVPSLKPPACDAATPCNEVSGGKAAMLFAGLYLVALGVGGVKGSLPSHGAEQFDDNTPSGRRQRSTFFNYFVFCLSCGALIAVTFVVWVEDNKGWEWGFGISTIAIFVSIPVFLAGSTTYRSKIPSGSPLTTILKVLVAASLNSCFNSRNSSSAVVNMTSSPSNPHSGSRKQQAGKEASNTTNKEPEALTNTLKFLNKAADQNNNNPIYSSIECTVEQVEDVKIVLKVLPIFACTIMLNCCLAQLSTFSVEQAATMDTKLGSLKVPPASLPIFPVLFIMVLAPIYDHIITPFARRVTKTEMGITHLQRIGIGLVLSIVAMAVAAVVEVKRKRVAMETHTNNNNSLLGHDATKPLPITFLWIAFQYLFLGSADLFTLAGLLEFFFTEAPSSMRSLATSLSWASLAVGYYLSSAIVSIVNSVTGNTSHRPWLSGANLNHYHLERFYWLMCVLSALNFLHYLFWAIRYKYRGTGTTNNN

SEQ ID NO: 378 - DNA, 1758 bp, Glycine max; identical to SEQ ID NO: 81
  CDS (1)..(1758)

SEQ ID NO: 379 - protein, 585 aa, Glycine max; identical to SEQ ID NO: 72

SEQ ID NO: 380 - DNA, 1791 bp, Glycine max
  CDS (1)..(1791)
atgtcttacttagagtctcaggtctacaaagagagaaagtttgaagaagaatcagaagaggtcactcttgatgggagtgttgatttccatggacgtcctgcaatcagagccaaatctggcagatgggtggctgcaattatcatcctcttgaaccaagctctggcaactcttgcattttttgggattggagtgaacctagtgttgtttctgacaagggtggtaggacaaaacaatgctgatgcagccaacaatgtgagcaagtggaccggaactgtttacatcttctctctagtgggtgctttcctcagtgattcttattggggaagatataaaacttgtgctgtctttcaggtcatatttgttataggtctaatgtccttatccctttcatcatacctattcttgcttaagcctaaaggttgtggtaatgaatcagttaattgtgggaaacattcaaaattggagatggggatgttctacctctcaatctatcttgttgccttggggaatggaggttatcaaccaaatattgccacatttggggcagatcagtttgacgaggagcactcaaaggagggtcacaataaggtggccttctttagctacttctacctagcttttaacattggccaactcttctcgaacaccattctggtctattttgaggacgaaggaatgtgggctcttggtttctggctgtctgcaggctccgcctttgctgcattggtcttgtttcttgtatgcaccccaaggtatagacacttcaagcctagtggcaaccctctctccaggttcagccaagtccttgtggctgcatcaaggaaatccaaagttcaaatgtcatcaaacggagaggacttattcaacatggatgcaaaggaggcttccaacaatgccaatagaaagattctccacactcacgggttcaagttcttggatagggcagcgtttatatcttcaagagatctaggggaccagaaagggctcggttacaacccctggcatctctgtcctgtaagtcaagttgaagaagtgaagtgcatactgagactacttccaatctggctctgcaccataatatactcggtggttttcacacaaatggcttcactttttgtggagcaaggtgctgccatgaaaaccaaggtttccaacttcagaataccaccagctagcatgtccagctttgacatcctcagtgtggctgttttcattttcttttaccgtcgagttcttgatccgtttgtgggaaaacttaaaaagacagattctaagggacttacagaacttcagagaatgggagttggacttgttatagctgtactggcaatggtttcggctggattagttgaatgctataggctcaagtatgcaaaacaaggatgcatccactgcaatgactcgagcactttaagcatcttctggcaaatccctcagtatgcatttataggagcttccgaggtttttatgtacgtaggccagttggagttcttcaatgctcagacaccagacggcttgaagagctttggaagtgctctttgcatgacatccatttcccttgggaactatgtgagtagcttacttgttagtgtggttatgaagatatccaccgaagatcacatgccggggtggatccctggaaacctcaacaaaggtcacttagatagattttacttcctcttagctgccttgacatcgatagacttgattgcttatattgcatgtgcaaaatggtacaagtctatacagctagaggcaaacactggagagattgatgagccagaagtataa

SEQ ID NO: 381 - protein, 596 aa, Glycine max; identical to SEQ ID NO: 199

SEQ ID NO: 382 - DNA, 1833 bp, Glycine max
  CDS (1)..(1833)
atggagatagagaagagcactaagggcagtgcggaaataggagagaaagaagagaagaagaagaagcagcatcgacgaggaggcatcagaacattacctttcattcttgcaaatgaagtgtgtgacagatttgcaagtgctggttttcatggtaacttgataagttacttgacccaagagctgaacatgccattggtagctgcctcaaacacactgacaaactttggaggaacatctagcttcacccctctcattggggctattatagcagattcctttgctggacgtttttggaccattaccgttgcttctctcatttatgaactgggattgattagcatcactgtatcagctatactgccacaatttcgtcccccaccatgcccaacacaagctaattgccaagaagccacatcctcacaactgtggatactctacatctccctcctcctcacatctgttggatcaggtggcattagaccatgtgttgtgcccttttcagcagaccaaattgacatgaccaaaagtggtgtggcatcaagaaagtggaacatcttcaattggtactttttcagcatgggcttcgcttctcttagtgctttgaccattgtggtttacatccaagacaacatgggctggggttggggccttggaattccatgcattgccatgttgatatccatcgttgcctttgtgttgggctcaccactttataagaccgtaaaaccagaagggagccctttggttcgtttggcccaagtaaccgtggcagctataaagaaaaggaaggaggctttaccagaagatcccaagcttttgtaccataattgggaacttgatgcttcaatttctttagaagggaggcttctacactctgatcaatataaatggttggacaaagctgcaattgtcacagaggaggaggccaaagatccaactacaacaccaaaattatggaaattagccactgtccacagagttgaggagctaaaatccatcatcagaatgcttccaatttgggcatcaggaatcctgctcataacttcttcatcacatctgcacagttttgtgattcaacaagctcgcacgatggaccgtcacctctctccctcgttccaaatttccccagccagcatgtccattttcagcgtgctaaccatgatgtcaggagttgttctatatgaacgcctctttgttccctttgcgcgcagattcacagggaacccttctggaatcacatgtttgcaaagaatgggaataggcttcataatcaatatcatagccactgtgattgctggcctaatggaaatgaaaaggaaatctgttgctgctaagtaccacttattggatgatccaaaagccactattcctataagtgtgttctggttggtacctcagtattgccttcatggggtggctgaaattttcatgtctgttgggcatttggaatttctctttgagcaatcacctgaaagcatgagaagcagtgctacagcactgtactgcataaccacagccattgggaactacatgggtacattgctggtgtcattggtgcataagtacactggcaaggagaataattggcttccggataggaacctcaataggggtggattggactactattattttcttgttagtgggattcaagttgtgaatctcgtttattattttatatgtgcttggttttacacttacaagtccgtggaagaaattagtgaaaagaacaaggaagaggatttggaacaagccaacgaacatgtctcatctgatgacaagttaaatgatggtaaggaggaagaaaagagaggattaacgaaagatgaatga

SEQ ID NO: 383 - protein, 610 aa, Glycine max
MEIEKSTKGSAEIGEKEEKKKKQHRRGGIRTLPFILANEVCDRFASAGFHGNLISYLTQELNMPLVAASNTLTNFGGTSSFTPLIGAIIADSFAGRFWTITVASLIYELGLISITVSAILPQFRPPPCPTQANCQEATSSQLWILYISLLLTSVGSGGIRPCVVPFSADQIDMTKSGVASRKWNIFNWYFFSMGFASLSALTIVVYIQDNMGWGWGLGIPCIAMLISIVAFVLGSPLYKTVKPEGSPLVRLAQVTVAAIKKRKEALPEDPKLLYHNWELDASISLEGRLLHSDQYKWLDKAAIVTEEEAKDPTTTPKLWKLATVHRVEELKSIIRMLPIWASGILLITSSSHLHSFVIQQARTMDRHLSPSFQISPASMSIFSVLTMMSGVVLYERLFVPFARRFTGNPSGITCLQRMGIGFIINIIATVIAGLMEMKRKSVAAKYHLLDDPKATIPISVFWLVPQYCLHGVAEIFMSVGHLEFLFEQSPESMRSSATALYCITTAIGNYMGTLLVSLVHKYTGKENNWLPDRNLNRGGLDYYYFLVSGIQVVNLVYYFICAWFYTYKSVEEISEKNKEEDLEQANEHVSSDDKLNDGKEEEKRGLTKDE

SEQ ID NO: 384 - DNA, 1776 bp, Zea mays
  CDS (1)..(1776)
atgctcgtcggcggcgggcgggacgacgaggaggtgctccggaagctcaagagcatggacgtggacaagctggagaacggcggaggcggcggcgacgcggagagcccgcgccccgtcgtcaagtaccacggctggaaggccatgcccttcatcatcgggaacgagacgttcgagaagctgggcacgctgggcacgtcggccaacctgctggtgtacctgacgcaggtgttccacatgcggagcgtggacgcggccacgctgctcaacgggctcaacggcaccaccagcctcgcccccatcgtcggcgccttcctctccgacgcctacctcggccgctacctcgcgctcgccatcgcctccatcgcctccctcatcggcatgttcctgctgacgcttacggccggcgcggacagcctgcacccgccggaatgcggcgtgggcgaggcctgcgagaaggcgacgtcgtaccagttcgcggtgctcttcgtcgccttcgcgttcctggtgctgggctcggcggggatccgcccctgcagcatgcccttcggcgccgaccagttcgacccccacacggagtccggcaagcgcggcatcaacagcttcttcaactggtactacttcacgttcacggcggccatgatgatctccgccaccgtcatcatctacgtgcagagcaacgtgagctggcccatcgggctgggcatccccacggcgctcatgttcctggcctgcgtgctcttcttcatgggcacgcgcctctacgtgcgggtgacgcccgaggggagccccttcaccagcgtcgtgcaggtgctgtcggccgcgctcaagaagcggtcgctgaagcagcccaaggacccgaagcaggacctcttcgacccgccgcacaccagcgccatcgtcacccagctcgcgcacacggaccagttccgctgcctcgacaaggcggccatcgtggcgtcccaggacgagttgcgccccggcggcgccgcgcccgcggacccctggaggctctgcagcgtgcagcaggtggaggaggtcaagtgcctcatccgcatcgtgcccgtctggtccacggggatcatctactacgtcgccgtggtgcagcagtccacgtacgtggtgctctcggcgctgcagtccgaccgccacctcggcggcgccggcttccagatccccgccgcgtccttcaccgtcttcgccatgctcgcgcagacgctgtggatcccgttctacgaccgcctcctgctgcccaagctccggaagataaccggcaaggaagaggggttcacgctgctccagcgccagggcatcggcatcgcgctctccaccgtcgccatggtcatctctgccatcgtcgaggaccggcgccgtgccatcgcgctcagccagccgacgctcggaaccaccatcaccggcggggccatctcggccatgtccagcctgtggatggtgccgcagctcatgatcctgggcctatcggaggcattcaacctcatcagccagattgagttctactacaaggagatcccggagcacatgcggagcgtggcgggggcgctcgcattctgcaacctggcactcggcaactacctcagtggcttcctggtgaccatcgtgcaccggaccacggggtccgggcagaactggctggcgcaggacctcaacaagggccgcctcgacctcttctactggaccatcgcaggcatcggcgtctttaatctcatctacttcgtcatctgcgccaggtggtacaggttcaagggaaccagcaactga

SEQ ID NO: 385 - protein, 591 aa, Zea mays; identical to SEQ ID NO: 241

SEQ ID NO: 386 - DNA, 1650 bp, Zea mays
  CDS (1)..(1650)
atggaccccaacggcggcggcgacaccatcctcggcgatcccctccttcccctctcgcagtccagcaagcagcagcaggatcctctcgccggcgtctccgactaccttgggcggtccgtgcaccgcggaagctccgggggatggagatccgcgctcttcgtcgtgggcgtcgagatcgccggtagcttcgcctacttcggcatctctgccaacctaatcacgtacctgactggtccgctgggacagtccaacgcctccgctgccgcctccgtcaacgcctggtccggcacggcctgcatcatgcccctgctcggcgccttcctcgccgacgcctacctgggccgctaccgatccgtcatcatcgcctgcaccctctacgtcctggggtatggtatgctgacgctgtcggcgacggtgccggcgctgcagccgtcgcacatgccctgcagggaggatggcgtctcgtcgtcgtcatgccaacccgggtggccgcaggtggccttcttctacgtgcccctgtacctgatcgccatcgcgcagggcgccgacaagccgtgcgggctggcgttcgcggcggaccagttcgacgcggagcaccagggggagcgcgcctcccgcgggtccctattcaactggtggttcttctgcatggccatcggcatctccgtgtcagtctccgtggtgggctacatccaggagtacgtcgggtgggggctcggcttcggcgtcccctgcgccatcgtgctctgcgccttcctcgtcttcctgttgggcaccccgacgtaccgcctgtacgcacccacgccggaagccaagtccccgttccgccgcctggcacgcggcctggccgccaacgccaacaaaacaggaggcctctccgcctcgcattcggaggaggaggaagcggcagcagacgcgcggtgcgtgctgcgcctgctgcccatctgggcggcgagcctggcgtacggcgtggtgtacgcgcagattatgacgctgttcaacaagcaggggcgcaccctggaccgccacatcggggacggccttgagctgcctccggcggcgctgcagacgctgggccccgcgagcatcctgctgttcgtgcctgtttacgaccgcgcggtggtgccggcgctgcggtgggcgacgggcaacccgtcggggctgagcatgctgcagcgcgtgggcgcgggcatggcggtgtcgctggcgggcgtggcggtggccgcgctggtggaggcgcggcggctggcgatggcgcgggagcacgggttggtggacgacccgtcggcgacggtgcccatgagctgggcgtggatcgtgccgcagtacgccatgatgggggtggcggacgtgctggccgtggtgggcctgcaggagctcttctacgaccagatgcccgacgggctccgcagcctggggctggcgctctacctcagcgtcatgggcatcgggggattcatcagcagtctgctcatctccctcatcgacggcgtcaccggcagcggtggcggggacagctggttcgccgacaacctcaaccgcgcgcacgtcgactacttctactggctgctggcggggctcagcgccgtcgaactcgcgctcttcctctactttgcgcgctcctacgtctacaagcacaagcccaattaa

SEQ ID NO: 387 - protein, 549 aa, Zea mays
MDPNGGGDTILGDPLLPLSQSSKQQQDPLAGVSDYLGRSVHRGSSGGWRSALFVVGVEIAGSFAYFGISANLITYLTGPLGQSNASAAASVNAWSGTACIMPLLGAFLADAYLGRYRSVIIACTLYVLGYGMLTLSATVPALQPSHMPCREDGVSSSSCQPGWPQVAFFYVPLYLIAIAQGADKPCGLAFAADQFDAEHQGERASRGSLFNWWFFCMAIGISVSVSVVGYIQEYVGWGLGFGVPCAIVLCAFLVFLLGTPTYRLYAPTPEAKSPFRRLARGLAANANKTGGLSASHSEEEEAAADARCVLRLLPIWAASLAYGVVYAQIMTLFNKQGRTLDRHIGDGLELPPAALQTLGPASILLFVPVYDRAVVPALRWATGNPSGLSMLQRVGAGMAVSLAGVAVAALVEARRLAMAREHGLVDDPSATVPMSWAWIVPQYAMMGVADVLAVVGLQELFYDQMPDGLRSLGLALYLSVMGIGGFISSLLISLIDGVTGSGGGDSWFADNLNRAHVDYFYWLLAGLSAVELALFLYFARSYVYKHKPN

SEQ ID NO: 388 - DNA, 1758 bp, Triticum aestivum
  CDS (1)..(1758)
atggcagaggccggcgaccccaccctggagcaggggctcctcgctaacccggaggaatcgaaccaacttacatacactggagatggatccgtcgacttttcgggaaaccctgtcgtgaaggagaaaactggcagatggaaggcatgcccattcatcttaggtaatgaatgctgtgagcggttggcctattatggcatctcgacaaaccttgtgacttacttgacaaaaaaactacatgatggtaactcctctgctgctagaaatgtgactacatggcagggaacttgctatttgactccccttattggagctatcctggctgatgcatactgggggaggtattggacgatcgcaacgttctccacaatatacttcattgggatgtcagtactgactctttcagcatcagttcctatgctcatgcctccatcttgtgaaggagccatttgcccagaagccagtcctttgcagtataccgtattttttcttggtctttacctaattgcgctcggcactggtggaatcaagccatgtgtctcatcttttggagcggatcaatttgatgacacagatccagctgagcgaatccagaaggggtctttcttcaattggttctatttttcaataaacattggtgcccttatatcaagcagttttctggtttgggtgcaagacaatttaggatggggattaggctttggcattccgaccgtattcatgggtcttgccatcataagcttctttgccggcacctcactttatagattccaaaagccaggtggcagtcctatcacacgagtatgccaggtagttgctgccactttgcgcaagtggaacgcacatgttccagaggacagctctctcttgtacgagctaccagatggggtttcagcaatcgaagggagtcggcaattggagcacactgatgaactcagatgtctggacaaggcggctacaattactgatcttgatgtgaaagaagatagcttcaacaacccatggcgggtgtgcaccgtcacccaggtggaggaactgaagattttggtaaggatgttccctgtctgggcaacgacaattgtgttttcagctgtctatgctcagatgtccaccatgtttgtggaacaagggatggtgcttgatccaacaatcggctcattcaagatccctccagcatctctatccacctttgacgtggttagtgtcattatatgggttcctatctacgacagcatcctggtcccgatagccaggaggttcaccggcaaggagaggggcttttcagagctgcagcggatgggcatcggcctggtaatctccatcctcgcaatgtcagcagccgcggtcctcgagataaagaggctggccatcgccagggaggcgcacctggtggaccagaacgtcccggttccgctgagcatcctgtggcaaatccctcagtacttcctggtcggcgcctcggaggtgttcaccttcatcggggcgctcgagttcttctacgaccagtcgccggacgccatgcggagcctctgcagtgcgctgcagctcatcaccaccgcgctcgggaactacctcagcgccttcatcctcacgatggtcgcctacttcacgaccaggggagggaggcccgggtggatccctgacaacctcaacgaggggcgccttgattacttcttctggctgctcgcggggctcagctttctcaactttttggtgtacgtgctgtgcgccaacaggttcaagagcaagaaagcggcttga

SEQ ID NO: 389 - protein, 585 aa, Triticum aestivum
MAEAGDPTLEQGLLANPEESNQLTYTGDGSVDFSGNPVVKEKTGRWKACPFILGNECCERLAYYGISTNLVTYLTKKLHDGNSSAARNVTTWQGTCYLTPLIGAILADAYWGRYWTIATFSTIYFIGMSVLTLSASVPMLMPPSCEGAICPEASPLQYTVFFLGLYLIALGTGGIKPCVSSFGADQFDDTDPAERIQKGSFFNWFYFSINIGALISSSFLVWVQDNLGWGLGFGIPTVFMGLAIISFFAGTSLYRFQKPGGSPITRVCQVVAATLRKWNAHVPEDSSLLYELPDGVSAIEGSRQLEHTDELRCLDKAATITDLDVKEDSFNNPWRVCTVTQVEELKILVRMFPVWATTIVFSAVYAQMSTMFVEQGMVLDPTIGSFKIPPASLSTFDVVSVIIWVPIYDSILVPIARRFTGKERGFSELQRMGIGLVISILAMSAAAVLEIKRLAIAREAHLVDQNVPVPLSILWQIPQYFLVGASEVFTFIGALEFFYDQSPDAMRSLCSALQLITTALGNYLSAFILTMVAYFTTRGGRPGWIPDNLNEGRLDYFFWLLAGLSFLNFLVYVLCANRFKSKKAA

SEQ ID NO: 390 - DNA, 1758 bp, Glycine max
  CDS (1)..(1758)
atgaagcaggaaatggagaagagaaagggaggtagaattgaagaaagtgatgaagagaaatgggtccatgatgcatctgtggattacaagggaagaatccctctccgtgcttccacgggtgtatggaaagcttcgctttttgtccttgcaattgaatttagtgaaaggatagcccactttgggatatccagtaatcttatcatgtatctgactgaagtgatgcatgaagacctaaagacagcaaccaataatgcaaacttgtggaaaggagcaacaaccttgttgcctatgattgggggatttcttggtgatgcctacaccggtcgatttcgtatggtagtcttttcttccctcgtatacttcaagggattaagcctcttgaccatgtctcaattcattccaaatctaaaaccatgcaacaatgatatatgtcatcagccaagaaaggttcatgaagtggttttcttccttgctctttactgtatcgccttgggaactggaggattcaaaccatgcttagaaagttttggaggtgatcaatttgatggtgacaaccttgaagaacgaaagaagaagatgtctttcttcaactggtggacctttacattcagcattgctttgttgctagcgacaacggtggttgtttatgttcaggacttcgttagctggggagttgcttatctcatcctcgctatgttcatggctctcactatcattgctttctatgtggggatacctttttacaggtacagaatgaggccaaacgcaaatcctttcataccaattctacaagtcctaattgcatccataaggaaaaggaatttgtcttgtccttcaaatcctgctttattatgtgaagtcccaatgtcagagaattcccaaggaaggcttctaaaccatactagcaggctcaggtttcttgacaaggctgcaatagttgaagaaaagtatattgagaagaaagctggcccatggagattagcaacagtgacaagagtggaggagacaaagcttattctaaatgttgttccgatatggctaacttcattaatgattggtgtatgcatagcacaaggttcgacactctttgtcaaacaagcagctgctatgaacttaaagataagcgacaacttcaaaattccaccagcttccatggcgtccctttcagcctttagcaccataatatctgtcccaatatatgatagaattattgttccaattctaaggaaagtcagaggtaacgaaagaggcatcagcatccttgggaggattggcattggcttaatattcttagtcatactcatggttgttgctgccttagtagaaaatatgagattaagaatgcctggtcatgagacaatgagtgtgatgtggttgataccccaatacttgatccttggcattggaaattcattttatctaattgctttgcaagagtatttctatgatgaagttcctgactcaatgagaagcgtaggaatggctttgtatcttagtgtgattggaataggattcttcttaagcagctttctaataataattgtggaccatgtcacagggaagaatggcaaaggttggattgccaaggatgtaaactcaagtcgtctagataagttttattggatgttggctgtcataagtgctttaaatttgtgtctcttcctattcttggcaaagaggtttacttataagaccgcacggaggaaagctacggaaattgattgttctaactgtgatggggtggatacagtggcatga

SEQ ID NO: 391 - protein, 585 aa, Glycine max; identical to SEQ ID NO: 215

SEQ ID NO: 392 - DNA, 1536 bp, Zea mays
  CDS (1)..(1536)
atggaaaagactcaggggccagagactcaggacggcgacttgcaagtgccgctccttgatgataagaactgcgccggcagcaaggcgccattggtagttcttgggttcgagtgcttggagagcacagctttcaatggcatctcgacgaacctggtgatgtacctggagaccgtcctccacggcagcaacgtggccagcgcctccaacgtcacgctgtggttcggcaccagctacctgacaccagtcttcggcgccatcatcgccgacgccttctggggcaactacaacaccatcctcgtctccctcgccatctaccttcttgggatgattctggtgaccttatcggcgttcctgccgacggacacggtgctcggcggctcctcggtgttcggcgcgcacacggtagcgttcgtggggctttacctcgtcgcgatcgggagcggcggggtgcggtcatcgctgctgacgttcggcgcggagcagttcgatgacgacaatgcggcggatcgcgagaacaagctgtccttcttcagctggttttacctatgcgtcgactttggcccgatcgtctccggcctgttcatcgtgtggatccaggagaacatcagctggggcctcggctttggcatctctaccgcctgcatcgcgctggccttgggcgcattcgtgctcgccacgcccatgtacaagcgctcgacgcccaccgccggcaaggcgtccgtcatctccgactccgagacgggcttggaagcgatatcggaggaggcgggctcgtcgcagaagctccgcgccgcgacgaaggcagaggagttcaagaccctgctgggacttctgcccatctgggcgaccagcatcatcgtctcctcggcgtacacgcagatgaacaccaccttcatccagcaaggcagcgccatgaacgtgtccgtcctgtcggtgcaggtgccaccggcgtcgatgggctcgttcgaggtggtctgcgtcctcatatgggtgctgctgtacggccacgtgatcgtgccggcgctgaggggatgcgggttctcgttcggcggcgacggcgaaccgtctcagctgcagcgcatgggcgccggccggctcctcatggccctggcgatggcggtcgcggcgctcgtggagatgaagcggctcggcagcgcggcgcgcggggaggagatcaccatcgcgtggcagattccgcagtacttcttcctggccggcgcggaggtgttgtgctacatcgcgcagctggagttcttctacgaagaggcgccggaaaccatgaagagcacgtgcacgtcgctcgcgctgctcaccatcgccctgggcagctacctcagctccttcatctacgctatcgtggcagcattcacggccacggcggacagtcccggatggatctccgacaacctaaaccagggccatctcgactacttcttctggaccatggccgccatttcaacgctcaacttcgtcgtgtacagcgtgttcgccaggaactacaagcccaagagtcaagactatgctctcatgacgtga

SEQ ID NO: 393 - protein, 511 aa, Zea mays
MEKTQGPETQDGDLQVPLLDDKNCAGSKAPLVVLGFECLESTAFNGISTNLVMYLETVLHGSNVASASNVTLWFGTSYLTPVFGAIIADAFWGNYNTILVSLAIYLLGMILVTLSAFLPTDTVLGGSSVFGAHTVAFVGLYLVAIGSGGVRSSLLTFGAEQFDDDNAADRENKLSFFSWFYLCVDFGPIVSGLFIVWIQENISWGLGFGISTACIALALGAFVLATPMYKRSTPTAGKASVISDSETGLEAISEEAGSSQKLRAATKAEEFKTLLGLLPIWATSIIVSSAYTQMNTTFIQQGSAMNVSVLSVQVPPASMGSFEVVCVLIWVLLYGHVIVPALRGCGFSFGGDGEPSQLQRMGAGRLLMALAMAVAALVEMKRLGSAARGEEITIAWQIPQYFFLAGAEVLCYIAQLEFFYEEAPETMKSTCTSLALLTIALGSYLSSFIYAIVAAFTATADSPGWISDNLNQGHLDYFFWTMAAISTLNFVVYSVFARNYKPKSQDYALMT

SEQ ID NO: 394 - DNA, 1713 bp, Zea mays
  CDS (1)..(1713)
atggaggagggtggcgagcacacgagtcttctggttaaggatgatgcatcatgtcatgacgaggaaacacagagtctattggaagcaaatctagggccacagctgaaaagtaaatgctctgattggagagcaccggcactcatcctgggattggaatgcttggagagcatggctttcaatggcattgccacaaacctagttgtgtatctccgttcagttctccatgggggtattgcttccagtgcagcaactgtatctctttggtacgggacaagcttctttgtgccaattcttggagccgccatagcagatacttgcttgggaaattataagaccatcttgatctcccttatcatgtacctatttggaatggtactaattacagttgcaacattcatgccttctacttcagtcttgtgcgacgtcagttcatgcttgtcatcaaatggaactcaaaccatgattttctttgctggtttgtatctcactgctgttggatgtggaggagtaagatctgcattgcttccgtttggtgctaaccagttcaacaacgagaacagtctagacataaaaaagagaagaaatttcttcagcttgttctatatatgtgtcatctttggtgtgattacttctgggacaatcatagtttgggttcaggaaaatgttagctgggctattggatatggagtcgccactacatgcataggtcttgctttgataggatttctggggggaacaccaatattccaagaagatgagccttgtggttctccagtgaagagtattttccaggttattgttgcctcttttaggaacatgagcttggaagtacctgctgatagctgtcttctgtatgaggtcgggagcaaccacatacaaaggacaaaacttgctcactctgatgattttaggttcttagataaggcggcagttatttctgatccaagcctggtgtatggaggctgtcgaagctcatggagcatatgtacagttactgaagttgaggaactgaaaatacttatccgcttgctcccaatatgggtgactggaatattctttgctgctgcgatctcgcaaatgcacaccacttttattcagcagggaactgtgatggacaccaagatcggttccctgtccattccaccagcatccttatactcatttgaagtgatatgtgtcacgctttgggtacttgctgtcaacaaagtgcttgtgccggcaatccgaacgtattttgcaaatggggtagagctcacacagttacagaggattgggatcggtcgtttcctgatgatctttgccatagcaatggcagcacttctagaaaccaagaggctgcatattgttcaggagggggaactgctaagcattgtatggcagcttccacagtacttcgtcattgctggggctgagtgcttcggtatcatcactcagctggagttctttcatggccaggcgccagactccatgaagagcattttaacggcatttgcattgctcaccactgcccttgggaattacttgagctcagctatcatcaccctcatcgcaggggtgaccagggtatggcatagccctggttggataccagatgatctgaacaaaggacaccttgactactactactggtgtcttactaccctctcattggtgaattttgttgtgtatctgtattttgctagtaaatacaaattgaagaaagttgtttgttaa

SEQ ID NO: 395 - protein, 570 aa, Zea mays
MEEGGEHTSLLVKDDASCHDEETQSLLEANLGPQLKSKCSDWRAPALILGLECLESMAFNGIATNLVVYLRSVLHGGIASSAATVSLWYGTSFFVPILGAAIADTCLGNYKTILISLIMYLFGMVLITVATFMPSTSVLCDVSSCLSSNGTQTMIFFAGLYLTAVGCGGVRSALLPFGANQFNNENSLDIKKRRNFFSLFYICVIFGVITSGTIIVWVQENVSWAIGYGVATTCIGLALIGFLGGTPIFQEDEPCGSPVKSIFQVIVASFRNMSLEVPADSCLLYEVGSNHIQRTKLAHSDDFRFLDKAAVISDPSLVYGGCRSSWSICTVTEVEELKILIRLLPIWVTGIFFAAAISQMHTTFIQQGTVMDTKIGSLSIPPASLYSFEVICVTLWVLAVNKVLVPAIRTYFANGVELTQLQRIGIGRFLMIFAIAMAALLETKRLHIVQEGELLSIVWQLPQYFVIAGAECFGIITQLEFFHGQAPDSMKSILTAFALLTTALGNYLSSAIITLIAGVTRVWHSPGWIPDDLNKGHLDYYYWCLTTLSLVNFVVYLYFASKYKLKKVVC

SEQ ID NO: 396 - DNA, 1650 bp, Zea mays
  CDS (1)..(1650)
atggaccccaacggcggcggcgacaccatcctcggcgatcccctccttcccctctcgcagtccagcaagcagcagcaggatcctctcgccggcgtctccgactaccttgggcggtccgtgcaccgcggaagctccgggggatggagatccgcgctcttcgtcgtgggcgtcgagatcgccggtagcttcgcctacttcggcatctctgccaacctaatcacgtacctgactggtccgctacgacagtccaacgcctccgccgccgcctccgtcaacgcctggtccggcacggcctgcatcatgcccctgctcggcgccttcctcgccgacgcctacctgggccgctaccgatccgtcatcatcgcctgcaccctctacgtcctgggttatggtatgctgacgctgtcggcgacggtgccggcgctgcagccgtcgcacatgccctgcagggaggatggcgtctcgtcgtcgtcatgccaacccgggtggccgcaggtggccttcttctacgtgtccctgtacctgatcgccatcgcgcagggcgccgacaagccgtgcgggctggctttcgcggcggaccagttcgacgcggagcaccagggggagcgcgcctcccgcgggtccctattcaactggtggttcttctgcatggccatcggcatctccgtgtcagtctccgtggtgggctacatccaggagtacgtcgggtgggggctcggcttcggcgtcccctgcgccatcgtgctctgcgccttcctcgtcttcctgttgggcaccccgacgtaccgcctgtacgcacccacgccggaagccaagtccccgttccgccgcctggcacgcggcctggccgccaacgccaacaaaacaggaggcctctccgcctcgcattcggaggaggaggaagcggcagcagacgcgcggtgcgtgctgcgcctgctgcccatctgggcggcgagcctggcgtacggcgtggtgtacgcgcagattatgacgctgttcaacaagcaggggcgcaccctggaccgccacatcggggacggccttgagctgcctccggcggcgctgcagacgctgggccccgcgagcatcctgctgttcgtgcctgtttacgaccgcgcggtggtgccggcgctgcggtgggcgacgggcaacccgtcggggctgagcatgctgcagcgcgtgggcgcgggcatggcggtgtcgctggcgggcgtggcggtggccgcgctggtggaggcgcggcggctggcgatggcgcgggagcacgggttggtggacgacccgtcggcgacggtgcccatgagctgggcgtggatcgtgccgcagtacgccatgatgggggtggcggacgtgctggccgtggtgggcctgcaggagctcttctacgaccagatgcccgacgggctccgcagcctggggctggcgctctacctcagcgtcatgggcatcgggggattcatcagcagtctgctcatctccctcatcgacggcgtcaccggcagcggtggcggggacagctggttcgccgacaacctcaaccgcgcgcacgtcgactacttctactggctgctggcggggctcagcgccgtcgaactcgcgctcttcctctactttgcgcgctcctacgtctacaagcacaagcccaattaa

SEQ ID NO: 397 - protein, 549 aa, Zea mays
MDPNGGGDTILGDPLLPLSQSSKQQQDPLAGVSDYLGRSVHRGSSGGWRSALFVVGVEIAGSFAYFGISANLITYLTGPLRQSNASAAASVNAWSGTACIMPLLGAFLADAYLGRYRSVIIACTLYVLGYGMLTLSATVPALQPSHMPCREDGVSSSSCQPGWPQVAFFYVSLYLIAIAQGADKPCGLAFAADQFDAEHQGERASRGSLFNWWFFCMAIGISVSVSVVGYIQEYVGWGLGFGVPCAIVLCAFLVFLLGTPTYRLYAPTPEAKSPFRRLARGLAANANKTGGLSASHSEEEEAAADARCVLRLLPIWAASLAYGVVYAQIMTLFNKQGRTLDRHIGDGLELPPAALQTLGPASILLFVPVYDRAVVPALRWATGNPSGLSMLQRVGAGMAVSLAGVAVAALVEARRLAMAREHGLVDDPSATVPMSWAWIVPQYAMMGVADVLAVVGLQELFYDQMPDGLRSLGLALYLSVMGIGGFISSLLISLIDGVTGSGGGDSWFADNLNRAHVDYFYWLLAGLSAVELALFLYFARSYVYKHKPN

SEQ ID NO: 398 - DNA, 28 bp, Artificial sequence
  primer
atagagctctaactttgctccactcctc

SEQ ID NO: 399 - DNA, 32 bp, Artificial sequence
  primer
atacccgggtgctctgttcgttggtcaaactg

SEQ ID NO: 400 - DNA, 24 bp, Artificial sequence
  primer
atggagccagtagaagcttttaac

SEQ ID NO: 401 - DNA, 21 bp, Artificial sequence
  primer
ctaacttggagattgatcgtg

SEQ ID NO: 402 - DNA, 28 bp, Artificial sequence
  primer
ataccatggtaactttgctccactcctc

SEQ ID NO: 403 - DNA, 34 bp, Artificial sequence
  primer
atattaattaatgctctgttcgttggtcaaactg

SEQ ID NO: 404 - DNA, 28 bp, Artificial sequence
  primer
ataggtacctaactttgctccactcctc

SEQ ID NO: 405 - DNA, 32 bp, Artificial sequence
  primer
atagtcgactgctctgttcgttggtcaaactg

SEQ ID NO: 406 - protein, 618 aa, Artificial sequence
  consensus sequence
  Variant (2)..(10): Xaa in position 2 to 10 is any amino acid
  Variant (12)..(19): Xaa in position 12 to 19 is any amino acid
  Variant (20)..(21): Xaa in position 20 to 21 is any or no amino acid
  Variant (23)..(25): Xaa in position 23 to 25 is any amino acid
  Variant (28)..(29): Xaa in position 28 to 29 is any amino acid
  Variant (30)..(30): Xaa in position 30 is any or no amino acid
  Variant (33)..(46): Xaa in position 33 to 46 is any amino acid
  Variant (47)..(51): Xaa in position 47 to 51 is any or no amino acid
  Variant (53)..(60): Xaa in position 53 to 60 is any amino acid
  Variant (62)..(65): Xaa in position 62 to 65 is any amino acid
  Variant (67)..(69): Xaa in position 67 to 69 is any amino acid
  Variant (72)..(84): Xaa in position 72 to 84 is any amino acid
  Variant (86)..(89): Xaa in position 86 to 89 is any amino acid
  Variant (90)..(99): Xaa in position 90 to 99 is any or no amino acid
  Variant (101)..(117): Xaa in position 101 to 117 is any amino acid
  Variant (118)..(136): Xaa in position 118 to 136 is any or no amino acid
  Variant (138)..(138): Xaa in position 138 is any amino acid
  Variant (141)..(146): Xaa in position 141 to 146 is any amino acid
  Variant (147)..(147): Xaa in position 147 is any or no amino acid
  Variant (150)..(150): Xaa in position 150 is any amino acid
  Variant (155)..(161): Xaa in position 155 to 161 is any amino acid
  Variant (162)..(182): Xaa in position 162 to 182 is any or no amino acid
  Variant (187)..(199): Xaa in position 187 to 199 is any amino acid
  Variant (201)..(202): Xaa in position 201 to 202 is any amino acid
  Variant (204)..(205): Xaa in position 204 to 205 is any amino acid
  Variant (207)..(209): Xaa in position 207 to 209 is any amino acid
  Variant (210)..(210): Xaa in position 210 is any or no amino acid
  Variant (212)..(213): Xaa in position 212 to 213 is any amino acid
  Variant (215)..(228): Xaa in position 215 to 228 is any amino acid
  Variant (230)..(231): Xaa in position 230 to 231 is any amino acid
  Variant (233)..(235): Xaa in position 233 to 235 is any amino acid
  Variant (237)..(243): Xaa in position 237 to 243 is any amino acid
  Variant (244)..(246): Xaa in position 244 to 246 is any or no amino acid
  Variant (249)..(249): Xaa in position 249 is any amino acid
  Variant (250)..(254): Xaa in position 250 to 254 is any or no amino acid
  Variant (256)..(257): Xaa in position 256 to 257 is any amino acid
  Variant (259)..(261): Xaa in position 259 to 261 is any amino acid
  Variant (262)..(314): Xaa in position 262 to 314 is any or no amino acid
  Variant (317)..(317): Xaa in position 317 is any amino acid
  Variant (320)..(329): Xaa in position 320 to 329 is any amino acid
  Variant (330)..(345): Xaa in position 330 to 345 is any or no amino acid
  Variant (347)..(347): Xaa in position 347 is any amino acid
  Variant (349)..(349): Xaa in position 349 is any amino acid
  Variant (350)..(353): Xaa in position 350 to 353 is any or no amino acid
  Variant (357)..(357): Xaa in position 357 is any amino acid
  Variant (359)..(364): Xaa in position 359 to 364 is any amino acid
  Variant (366)..(366): Xaa in position 366 is any amino acid
  Variant (368)..(378): Xaa in position 368 to 378 is any amino acid
  Variant (380)..(384): Xaa in position 380 to 384 is any amino acid
  Variant (385)..(386): Xaa in position 385 to 386 is any or no amino acid
  Variant (388)..(400): Xaa in position 388 to 400 is any amino acid
  Variant (401)..(408): Xaa in position 401 to 408 is any or no amino acid
  Variant (410)..(411): Xaa in position 410 to 411 is any amino acid
  Variant (413)..(427): Xaa in position 413 to 427 is any amino acid
  Variant (430)..(433): Xaa in position 430 to 433 is any amino acid
  Variant (435)..(442): Xaa in position 435 to 442 is any amino acid
  Variant (443)..(447): Xaa in position 443 to 447 is any or no amino acid
  Variant (449)..(451): Xaa in position 449 to 451 is any amino acid
  Variant (455)..(455): Xaa in position 455 is any amino acid
  Variant (457)..(457): Xaa in position 457 is any amino acid
  Variant (459)..(472): Xaa in position 459 to 472 is any amino acid
  Variant (474)..(475): Xaa in position 474 to 475 is any amino acid
  Variant (477)..(483): Xaa in position 477 to 483 is any amino acid
  Variant (484)..(502): Xaa in position 484 to 502 is any or no amino acid
  Variant (504)..(505): Xaa in position 504 to 505 is any amino acid
  Variant (507)..(508): Xaa in position 507 to 508 is any amino acid
  Variant (511)..(514): Xaa in position 511 to 514 is any amino acid
  Variant (516)..(519): Xaa in position 516 to 519 is any amino acid
  Variant (520)..(520): Xaa in position 520 is any or no amino acid
  Variant (522)..(524): Xaa in position 522 to 524 is any amino acid
  Variant (526)..(527): Xaa in position 526 to 527 is any amino acid
  Variant (530)..(534): Xaa in position 530 to 534 is any amino acid
  Variant (536)..(537): Xaa in position 536 to 537 is any amino acid
  Variant (539)..(539): Xaa in position 539 is any amino acid
  Variant (541)..(544): Xaa in position 541 to 544 is any amino acid
  Variant (546)..(556): Xaa in position 546 to 556 is any amino acid
  Variant (558)..(563): Xaa in position 558 to 563 is any amino acid
  Variant (565)..(566): Xaa in position 565 to 566 is any amino acid
  Variant (567)..(567): Xaa in position 567 is any or no amino acid
  Variant (569)..(569): Xaa in position 569 is any amino acid
  Variant (570)..(578): Xaa in position 570 to 578 is any or no amino acid
  Variant (580)..(584): Xaa in position 580 to 584 is any amino acid
  Variant (585)..(585): Xaa in position 585 is any or no amino acid
  Variant (587)..(587): Xaa in position 587 is any amino acid
  Variant (589)..(589): Xaa in position 589 is any amino acid
  Variant (592)..(592): Xaa in position 592 is any amino acid
  Variant (594)..(596): Xaa in position 594 to 596 is any amino acid
  Variant (597)..(603): Xaa in position 597 to 603 is any or no amino acid
  Variant (605)..(613): Xaa in position 605 to 613 is any amino acid
  Variant (614)..(614): Xaa in position 614 is any or no amino acid
  Variant (616)..(617): Xaa in position 616 to 617 is any amino acid
WXXXXXXXXXEXXXXXXXXXXGXXXNLXXXYLXXXXXXXXXXXXXXXXXXXGXXXXXXXXGXXXXDXXXGRXXXXXXXXXXXXXGXXXXXXXXXXXXXXPXXXXXXXXXXXXXXXXXXXXXXXXXXXXXXXXXXXXGXGGXXXXXXXFGXDQFDXXXXXXXXXXXXXXXXXXXXXXXXXXXXFFNWXXXXXXXXXXXXXTXXVXXQXXXXWXXGXXXXXXXXXXXXXXFXXGXXXYXXXXXXXXXXSPXXXXXXVXXAXXXXXXXXXXXXXXXXXXXXXXXXXXXXXXXXXXXXXXXXXXXXXXXXXXXXXXXXLDXAAXXXXXXXXXXXXXXXXXXXXXXXXXXWXLXXXXXVEEXKXXXXXXPXWXXXXXXXXXXXQXXXXXXXQXXXXXXXXXXXXXXXXXXXXXPXXSXXXXXXXXXXXXXXXYDXXXXPXXXXXXXXXXXXXGXXXLQRXGXGXXXXXXXXXXXXXXEXXRXXXXXXXXXXXXXXXXXXXXXXXXXXSXXWXXPQXXXXGXXXXXFXXXGXXEFXXXXXPXXMXSXXXXLXXXXXXXXXXXSXXXXXXVXXXTXXXXXXXXXXWXXXXXXNXGXLDXFXXXXXXXXXXNXXXXXXXXXXYXXK

SEQ ID NO: 407 - protein, 18 aa, Artificial sequence
  protein pattern
  Variant (4)..(4): Xaa in position 4 is any amino acid
  Variant (6)..(6): Xaa in position 6 is any amino acid
  Variant (7)..(7): Xaa in position 7 is Ile, Leu, Met or Val
  Variant (8)..(8): Xaa in position 8 is Ala, Ile, Leu or Val
  Variant (9)..(11): Xaa in position 9 to 11 is any amino acid
  Variant (13)..(13): Xaa in position 13 is any amino acid
  Variant (15)..(17): Xaa in position 15 to 17 is any amino acid
  Variant (18)..(18): Xaa in position 18 is Ala, Ile, Leu or Val
VEEXKXXXXXXPXWXXXX

SEQ ID NO: 408 - protein, 24 aa, Artificial sequence
  protein pattern
  Variant (2)..(4): Xaa in position 2 to 4 is any amino acid
  Variant (5)..(5): Xaa in position 5 is Ala, Gly or Ser
  Variant (6)..(7): Xaa in position 6 to 7 is any amino acid
  Variant (8)..(8): Xaa in position 8 is Ala, Asp or Glu
  Variant (10)..(12): Xaa in position 10 to 12 is any amino acid
  Variant (13)..(13): Xaa in position 13 is Glu, Gln or Arg
  Variant (14)..(14): Xaa in position 14 is any amino acid
  Variant (15)..(15): Xaa in position 15 is Pro or Ser
  Variant (16)..(17): Xaa in position 16 to 17 is any amino acid
  Variant (18)..(18): Xaa in position 18 is Leu, Met or Val
  Variant (19)..(19): Xaa in position 19 is any amino acid
  Variant (20)..(20): Xaa in position 20 is Ala, Ser or Thr
  Variant (21)..(21): Xaa in position 21 is any amino acid
  Variant (22)..(22): Xaa in position 22 is Ala, Cys, Gly or Ser
  Variant (23)..(23): Xaa in position 23 is any amino acid
  Variant (24)..(24): Xaa in position 24 is Ala, Gly or Ser
FXXXXXXXFXXXXXXXXXXXXXXX

SEQ ID NO: 409 - protein, 18 aa, Artificial sequence
  protein pattern
  Variant (2)..(3): Xaa in position 2 to 3 is any or no amino acid
  Variant (5)..(6): Xaa in position 5 to 6 is any amino acid
  Variant (7)..(7): Xaa in position 7 is Ala, Pro or Ser
  Variant (8)..(8): Xaa in position 8 is Ala, Cys, Asn, Ser or Thr
  Variant (9)..(10): Xaa in position 9 to 10 is any amino acid
  Variant (11)..(11): Xaa in position 11 is Ala, Gly, Pro, Ser or Thr
  Variant (12)..(12): Xaa in position 12 is any amino acid
  Variant (14)..(14): Xaa in position 14 is Ala, Gly, Ser, Thr or Val
  Variant (17)..(17): Xaa in position 17 is any amino acid
  Variant (18)..(18): Xaa in position 18 is Asp or Asn
GXXGXXXXXXXXGXDQXX

SEQ ID NO: 410 - DNA, 555 bp, Arabidopsis thaliana
  CDS (1)..(555)
atggaaaacacttacgttggccaacgagattaccgcttcaacgttaaccagttgtcctacagaggcattcgtcggaggaaatggggcaaatgggtatcggagatccgagaacccggtaagaaaacaaggatttggcttggaagctacgagacggccgagatggctgcagcggcctacgatgctgcggctcttcacctccgaggacgtgggaccaatctcaactttccggaactcgtcgacagttttcctcggccggaaagctctagttcggagcacattcaagcggctgcacaagatgcagcacttatgtttaaaccaggtaggttgagtgaaccagctctcgagtctggtcaaggactttctcgagtaggattgtctccggatcagattcaagcgattaatgagtctccattagactcgccgaggatggggtggatgcaggatttggaagttgctgactacgaagaattatacggacaattttttggtcagcacgatagggatgagttttttgaaatgcagcaatttcagtccatatggaattctaataattga

SEQ ID NO: 411 - protein, 184 aa, Arabidopsis thaliana
MENTYVGQRDYRFNVNQLSYRGIRRRKWGKWVSEIREPGKKTRIWLGSYETAEMAAAAYDAAALHLRGRGTNLNFPELVDSFPRPESSSSEHIQAAAQDAALMFKPGRLSEPALESGQGLSRVGLSPDQIQAINESPLDSPRMGWMQDLEVADYEELYGQFFGQHDRDEFFEMQQFQSIWNSNN

SEQ ID NO: 412 - DNA, 552 bp, Brassica napus
  CDS (1)..(552)
atggaaaacaaaaatgttggtcaactagaacaacgattctctgttgaccaagtgtcttatagaggcgttcgccagaggaagtggggaaaatgggtgtcggaaatccgagaacccggtaagaaaacccgtatttggctcggaagctacgagacggccgaaatggccgcagctgcttacgacgttgcggctattcacctccgaggacgtgggacacatgtcaactttccggagcttgctgacagttttcctcagccgcaaagctcaagttccgagcacattcaagctgctgctcaggaggcagcactgctgtttaaaccgggcgtgtcgtctactgaagcagatctcgggtcgggtcagggacattctcgggtcggattgtctccggatcagattcaggcgattaatgaatttccattggactcgccgaggagggggtggatgcaggatttggaagtggatgattatgaagagttgtacggacgaatttttggtcaatgcgatagagatgagtattttgaaatgcagcagtttcgatccatattgggatcttaa

SEQ ID NO: 413 - protein, 183 aa, Brassica napus
MENKNVGQLEQRFSVDQVSYRGVRQRKWGKWVSEIREPGKKTRIWLGSYETAEMAAAAYDVAAIHLRGRGTHVNFPELADSFPQPQSSSSEHIQAAAQEAALLFKPGVSSTEADLGSGQGHSRVGLSPDQIQAINEFPLDSPRRGWMQDLEVDDYEELYGRIFGQCDRDEYFEMQQFRSILGS

SEQ ID NO: 414 - DNA, 1158 bp, glycine max
  CDS (59)..(757)
cacatttttccttcactcactcccatcacaataatttcttccctccttccttcccacaatggtcatggaagaatctaaccctttagacaatgaagttcaaccaaccacttcatcatcctctttcaccattactactccctctacctcctcttcctcctccatagaagaagccactaacactactactaaggagaaaaagaagaagagagccattagtaatattgaagggaagcaccctacgtatagaggagtacgtatgcgtcaatggggcaaatgggtatccgaaattagagagccaaggaagaaatcaagaatttggcttggaacttttcccactcccgatatggcggctcgagcccatgatgtggcggctctcacgatcaaaggcagctcggcttacctcaatttccccgaattagccgccaagctgccccgccccgccagcacctcccccaaggacatccaagctgcggcggctaaagcctccgccttggatttcggtcaccaaagccatgaagccgaatccgagctgagccaagccgtttcctcctcaatccaaacacaatcatcatcatcatcatccaattcatcgttgaagggtgtggatgacacattcttggaccttcctgatctctctcttgacttgagccatggagccgatgagtttcattattcatcggcttggcttgtagccggagccgaacatatagagctgggtttccggcttgaggaaccttttctttgggaatcatattaagttaccttcctcaagtaggccaatttccctttttttgatgtttgtgctgcctctcttttttctttgttcctttcacttttgagctacttgcaagaaccttgaagaatccaatatgctctatggcagcatgacgtgggggtgtcaaacttcagtgtccatgacaaataaagaagttttactaaacccactccatagctttttttattcaagaatttatgtaaatattaaaatatcatctgtcattttcagataaggtaattaattaagttgccttgcatcatattcctcaatttgttgtaaatttcctcgcttgtcatctgtatatcctcccctttgtcaaaattcagtttaatttgtgtatgggtgaatgtggaataaagttcagctgggtaaatttgatt

SEQ ID NO: 415 - protein, 232 aa, glycine max
MVMEESNPLDNEVQPTTSSSSFTITTPSTSSSSSIEEATNTTTKEKKKKRAISNIEGKHPTYRGVRMRQWGKWVSEIREPRKKSRIWLGTFPTPDMAARAHDVAALTIKGSSAYLNFPELAAKLPRPASTSPKDIQAAAAKASALDFGHQSHEAESELSQAVSSSIQTQSSSSSSNSSLKGVDDTFLDLPDLSLDLSHGADEFHYSSAWLVAGAEHIELGFRLEEPFLWESY

SEQ ID NO: 416 - DNA, 1207 bp, zea mays
  CDS (203)..(853)
aagcaccaccaacagctcttccatctcactgcaacatcgcatcgacagtctacagcatttgtcgatcaaacactgctcatcaagcttagttgtagttcgtcactactgtaacttggtcagctctcatcgtccagaaaacaagaggtggcggaacggaaggaacacatacacaagatagaagcttttggtcgctgcaacaataatggagatggtgctcgacaacagcgctccgggcgtcgtcgcggccgggcagtcgtaccgcggcgtgaggaagaggaagtggggaaagtgggtgtcggagataagagagccgggcaagaagacgcgcatctggctgggcagcttcgagtctccggagatggccgcggtggcgcacgacgtggcggcgctgcgcctgcgcgggcgcgaggcgcggctcaacttcccgggcctggtccaccgcttccgccgcccggccaccgccgagcccgacgacgtccgcgccgccgcgctggaggccgcggcccaggtccggttcaggcccgacctcgtcgcaatgcaggcctccggcggggagggcggctgccgcttcggcggcgccggcggcagcgacgacaccggcagcccggagccgctggctgcaggcgaggacgatgtggcgtgggacgtcttgctcgggaccgacgtggaggtggtggagtcgcccaagatgtgggatgagctggccgaggccatgctcgtggccccgccgccagtgtgggagggcgatatggaggacactgacgactgggcccaggggggtaatctctgggacctacctgtctgggccctgggccccaccggcagatgcagcttcacatcctttggtttttagaggtgtgaactgaaaacccatcagtttaatcaatcttcttcttaaaagttaaaaccatatatataggccaatgagcacatgaggtattctattctagagagcataattgatcatcgttaagaatgttctaatgatcctttgattttctttggtttctaaacgtctatgggtcccgtctgtcagtgtgtgcagacttggtagctagcaaagaaggtctagctagctagctagcacgtgcaattcacgtgggtaaaaaaaacaacaagcaggatgtaattctttctgtttccctctcatctcatggatgagaagttgaaatgcaactgctgctctaaaataaaaaaaaaaaaaaaa

SEQ ID NO: 417 - protein, 216 aa, zea mays
MEMVLDNSAPGVVAAGQSYRGVRKRKWGKWVSEIREPGKKTRIWLGSFESPEMAAVAHDVAALRLRGREARLNFPGLVHRFRRPATAEPDDVRAAALEAAAQVRFRPDLVAMQASGGEGGCRFGGAGGSDDTGSPEPLAAGEDDVAWDVLLGTDVEVVESPKMWDELAEAMLVAPPPVWEGDMEDTDDWAQGGNLWDLPVWALGPTGRCSFTSFGF

SEQ ID NO: 418 - DNA, 730 bp, glycine max
  CDS (6)..(500)
tattgatgtgcagcatcagtgagaaagccaaaaggaagcgccaatctgcattccgcggagtgcgcaaacgcagctggggacgctacgtctctgagataaggctcccgggccagaaaacacgcatatggctcggctccttcggctcgcctgagatggcggctcgcgcttatgactccgctgctttcttcctcaaaggaacatctgccactcttaatttccccgacctcgtacactccctgcctcgacctctctcatcttcccggagggacatacagtccgccgcagctgaagccgctctccactctccgcctcccaaagaagaacaagaatctattttcacttccaccaccacctcgtcctttcacgatgtcatggaagctcctcttatgagtccccttagggtggactccactttcggagatttctcatgggaccaactcttcgatttcaacgatgacattctcatcgtgggatcaacttctgccactcttgtcccttaacgctgcttttgcaattcgccacccactgcttctagaaactagctggattttctttcactttctgttaataactcttctctgcttttctaagacttgcttctgaactcttgtacaaaggagctctccaagacaaatatatatatatatatatatatatatatatatatatatatatatatatatatatatatatgtttactgagagactgatttcactaagcaccttaatt

SEQ ID NO: 419 - protein, 164 aa, glycine max
MCSISEKAKRKRQSAFRGVRKRSWGRYVSEIRLPGQKTRIWLGSFGSPEMAARAYDSAAFFLKGTSATLNFPDLVHSLPRPLSSSRRDIQSAAAEAALHSPPPKEEQESIFTSTTTSSFHDVMEAPLMSPLRVDSTFGDFSWDQLFDFNDDILIVGSTSATLVP

SEQ ID NO: 420 - DNA, 876 bp, Glycine max
  CDS (40)..(681)
cgaaagcacggggtgcggctcgagcttcattcattctttatggatcaagaaacaacaagaagaaacaccatgcaagaatgtcatgtgatagccccaacaacaacaacggcaacatcatcgtatcgtggagttcgtcagcgaaaatggggcaaatgggtgtccgaaatccgtgagcctggaaagaagagcagaatatggttagggagctatgagtcaccagagatggctgcagcagcatatgacgtggcagcgttacaccttcggggacgagctgcaagactcaatttccccgaattagttgagacgctgccacgtccaacgagttcgaaacccgaagatgtccaagtggcagcacaacaagcggcggtgatgttcagaatatcaccaacaatgtcacctattaacaatcatcaaggatgtgtcaatgacaataacattattaagggtagtgtggttcctgtgagagtgggactctcacccacacaaattcaggccatcaatgagtccccattggactcaccaaagatgtggatggtgcaaatggcagaggcactcaggtttggtttcgatgatcactctatgatgatgctgccttctgatgatgatgattatgctttggagttgagtggatgggaagaaatacagcatgaatctttatgggactctccagaatatatgtaattaattacgtaactattaattaataatcaatgtacccttgatttagggcattatatattacatatgattaaagaatcatgtggttttagtgagactgattcaatgaagcaaaaggattaataaattatatatttgtaaattgcgtacagtatttcatgacccatttgtttctccaattgatttgtgtatgtgtct

SEQ ID NO: 421 - protein, 213 aa, Glycine max
MDQETTRRNTMQECHVIAPTTTTATSSYRGVRQRKWGKWVSEIREPGKKSRIWLGSYESPEMAAAAYDVAALHLRGRAARLNFPELVETLPRPTSSKPEDVQVAAQQAAVMFRISPTMSPINNHQGCVNDNNIIKGSVVPVRVGLSPTQIQAINESPLDSPKMWMVQMAEALRFGFDDHSMMMLPSDDDDYALELSGWEEIQHESLWDSPEYM

SEQ ID NO: 422 - DNA, 944 bp, Glycine max
  CDS (138)..(704)
gaccccgggaaaaagaaaagaaaagaaactcacagctattgaatttcacttcacttcacttgcatgccaaatgaaaacaacctcttcccagaatcttgtcggtatttaactccctcgatttcacaacaccaataacaatgagagtttcaacagagacagagccggagactaaaaagataaaacgcattcgcggcggcggggactcgagcaagcaccctttgtaccgcggcgtgcggatgcggaactgggggaagtgggtgtcggaaatccgcgagccgaggaagaaatcgcggatatggctaggcacattccccacgccggaaatggcggcgagagcgcacgacgtcgccgctctcagcatcaaaggccccgccgccattctcaacttccctcacttggccaactcgctcccccgcccggcttcgctggcgccgcgcgacgttcaagctgcggcggcgaaggcggcgcacatggacccttcctccctctcctccttggtctccgcaatggacttgtcctctgcctctgacgagttgagccaaatcatagagcttccttctttggaaagcaccgatgatggctctgttgacttaaagaaggagtttgtttttgttgattcccttgatgcttggatgtatcagccaccctttggttttgacaccgaacaagacactggtttcgagggtttgatgtggaattactaggttcgatccaagtttctattctatgtcttgtgtttgtataaatttatatcgatctcttttatgttttggtttgtgtgtgtctataagcagtaagcagccacttgtggtttttctttcgggggctgccagtgctactgatcactctcgtattcatcatcatgtctctgtgtccttttcttaattcctctgattttaattgtaaatggctagatgaataaagtaagaggagaaattttctgt

SEQ ID NO: 423 - protein, 188 aa, Glycine max
MRVSTETEPETKKIKRIRGGGDSSKHPLYRGVRMRNWGKWVSEIREPRKKSRIWLGTFPTPEMAARAHDVAALSIKGPAAILNFPHLANSLPRPASLAPRDVQAAAAKAAHMDPSSLSSLVSAMDLSSASDELSQIIELPSLESTDDGSVDLKKEFVFVDSLDAWMYQPPFGFDTEQDTGFEGLMWNY

SEQ ID NO: 424 - DNA, 919 bp, Glycine max
  CDS (274)..(858)
  misc_feature (899)..(899): w is a or t
aaacataagagaaggtttcgtggcagtggcgagtgaagaagctatgcctgatgagtgagtcatttttttctctctggtgggtcccatcctcttctgctctgagaacctttataagtgttatatgagtcattgagaagtgaccccaggaaaaagaaaagaaaagaaaaacttcacttcacttgcatgccaaatgagaacaacctcttcttagaataatttcctcggtgtttaagccttgtcgatttccgaacaccaatccgagttaattaaacaatgagagtttcgacagaaaagttagagacagagccggagagcaaaaagataaaacgcattcgtggcggcggcggcggggactcgagcaataagcaccctttgtaccgcggcgtgcggatgcggaactgggggaaatgggtgtcggaaatccgcgagccgcggaagaagtcgcggatatggctaggcacattcccgacgccggaaatggcggcgagggcgcacgacgtggcggctctcagcatcaaaggctccgccgccattctcaacttccctcactttgccaactcgctccctcgcccggcttctctcgcgccgcgcgacgttcaagccgcggcggccaaagcggcgcacatggacccttcttccctctcctcccttgtctccgcaatggacttgtcctctgcctctgacgagttgagccaaatcatagagcttccttctttggaaagcaccgatgatggctccgtcgtcttagagaaagagtttgtttttgttgactcccttgatgcttggatgtatcagccaccctttggttttgacaccgaacaagacactggtttcgagggtttgatgtggaattactagtttcgatccatgtttctgttctattctatgtcttatgttgwataaattaatattgatcgtc

SEQ ID NO: 425 - protein, 194 aa, Glycine max
MRVSTEKLETEPESKKIKRIRGGGGGDSSNKHPLYRGVRMRNWGKWVSEIREPRKKSRIWLGTFPTPEMAARAHDVAALSIKGSAAILNFPHFANSLPRPASLAPRDVQAAAAKAAHMDPSSLSSLVSAMDLSSASDELSQIIELPSLESTDDGSVVLEKEFVFVDSLDAWMYQPPFGFDTEQDTGFEGLMWNY

SEQ ID NO: 426 - DNA, 585 bp, Glycine max
  CDS (1)..(585)
atgagagtttcgacagaaaagttagagacagagccggagagcaaaaagataaaacgcattcgtggcggcggcggcggggactcgagcaataagcaccctttgtaccgcggcgtgcggatgcggaactgggggaaatgggtgtcggaaatccgcgagccgcggaagaagtcgcggatatggctaggcacattcccgacgccggaaatggcggcgagggcgcacgacgtggcggctctcagcatcaaaggctccgccgccattctcaacttccctcactttgccaactcgctccctcgcccggcttctctcgcgccgcgcgacgttcaagccgcggcggccaaagcggcgcacatggacccttcttccctctcctcccttgtctccgcaatggacttgtcctctgcctctgacgagttgagccaaatcatagagcttccttctttggaaagcaccgatgatggctccgtcgtcttaaagaaagagtttgtttttgttgactcccttgatgcttggatgtatcagccaccctttggttttgacaccgaacaagacactggtttcgagggtttgatgtggaattactag

SEQ ID NO: 427 - protein, 194 aa, Glycine max
MRVSTEKLETEPESKKIKRIRGGGGGDSSNKHPLYRGVRMRNWGKWVSEIREPRKKSRIWLGTFPTPEMAARAHDVAALSIKGSAAILNFPHFANSLPRPASLAPRDVQAAAAKAAHMDPSSLSSLVSAMDLSSASDELSQIIELPSLESTDDGSVVLKKEFVFVDSLDAWMYQPPFGFDTEQDTGFEGLMWNY

SEQ ID NO: 428 - DNA, 702 bp, Glycine max
  CDS (1)..(702)
atggtcgagcctgcagtagcagcaagctcagaattatcagactcaacacgaaacaccaacaccaacaccccttcaccctcttcctcatcgtcgttatctccgtcgccatcaccgtcatcatcaagctctaaaaagcgagcgagagacaacaacaatagtagaaacaacagcaacaagcattctgtgtatagaggtgtccgaatgcgcacgtggggcaaatgggtgtcggaaatccgcgagccgcgaaagaagaaccgaatctggctcggcaccttcgccaccgccgagatggcggcgcgtgcccacgacgtggcggcgctgacgataaaaggctcatccgccatccttaacttccccgaactcgccgcctccctgccccggccggcctccaactcgccccgcgacgtgcaggccgcggcagccaaggcggcgtccatggaggcgccgccgcggacccctccgtcgccggccgccacgccggaggatgacctcggcgagatcgtggagctgccgccgctcggaacgagtttcgactcgcccgaccggagttccgagtttgtgttcctggacatggacgacgggtggccctattctcacccgtggtaccacagcatttatgatggtgggtacttcattagcgacatgaacaacatggtttcgatgcaagagtcagagagcatggttctttccctgtggccttga

SEQ ID NO: 429 - protein, 233 aa, Glycine max
MVEPAVAASSELSDSTRNTNTNTPSPSSSSSLSPSPSPSSSSSKKRARDNNNSRNNSNKHSVYRGVRMRTWGKWVSEIREPRKKNRIWLGTFATAEMAARAHDVAALTIKGSSAILNFPELAASLPRPASNSPRDVQAAAAKAASMEAPPRTPPSPAATPEDDLGEIVELPPLGTSFDSPDRSSEFVFLDMDDGWPYSHPWYHSIYDGGYFISDMNNMVSMQESESMVLSLWP

SEQ ID NO: 430 - DNA, 570 bp, Glycine max
  CDS (1)..(570)
atgagagtttcgacagaaaagttagagacagagccggagagcaaaaagataaaacgcattcgtggcggcggcggcggggactcgagcaataagcaccctttgtaccgcggcgtgcggatgcggaactgggggaaatgggtgtcggaaatccgcgagccgcggaagaagtcgcggatatggctaggcacattcccgacgccggaaatggcggcgagggcgcacgacgtggcggctctcagcatcaaaggctccgccgccattctcaacttccctcactttgccaactcgctccctcgcccggcttctctcgcgccgcgcgacgttcaagccgcggcggccaaagcggcgcacatggacccttcttccctctcctcccttgtctccgcaatggacttgtcctctgcctctgacgagttgagccaaatcatagagcttccttctttggaaagcaccgatgatggctccgtcgtcttagagaaagagtttgtttttgttgactcccttgatgcttggatgtatcagccaccctttggttttgacaccgaacaagacactggtttcgaggtttga

SEQ ID NO: 431 - protein, 189 aa, Glycine max
MRVSTEKLETEPESKKIKRIRGGGGGDSSNKHPLYRGVRMRNWGKWVSEIREPRKKSRIWLGTFPTPEMAARAHDVAALSIKGSAAILNFPHFANSLPRPASLAPRDVQAAAAKAAHMDPSSLSSLVSAMDLSSASDELSQIIELPSLESTDDGSVVLEKEFVFVDSLDAWMYQPPFGFDTEQDTGFEV

SEQ ID NO: 432 - DNA, 567 bp, Arabidopsis thaliana
  CDS (1)..(567)
atggcttctgccggcttaggtagccggagaaaggatccggtgtacagaggaatccggtgccgaagtgggaaatgggtctccgagattcgtgagccgaggaaaaccacgagaatctggcttggaacttaccccatggcagagatggcagcagccgcctatgatgtggctgctatggctcttaaaggaagagaagctgtcttgaacttccctggatccgtcgggtcatacccggttcctgaatcaacatccgcagcagatatacgagccgctgcggcagccgcagcagcaatgaagggatgtgaggaaggggaggaggagaaaaaggcaaaggagaagaagagtagtagttcgaagtcgagagcgcgtgagtgccacgtagataatgatgttggatcttcgtcgtggtgtgggacagagttcatggacgaagaagaagtcttgaatatgcctaatctgctggctaatatggcagaagggatgatggttgcgccgccgtcgtggatgggttctcggccgtcggatgactctccggagaattcaaatgatgaggacttgtggggctattga

SEQ ID NO: 433 - protein, 188 aa, Arabidopsis thaliana
MASAGLGSRRKDPVYRGIRCRSGKWVSEIREPRKTTRIWLGTYPMAEMAAAAYDVAAMALKGREAVLNFPGSVGSYPVPESTSAADIRAAAAAAAAMKGCEEGEEEKKAKEKKSSSSKSRARECHVDNDVGSSSWCGTEFMDEEEVLNMPNLLANMAEGMMVAPPSWMGSRPSDDSPENSNDEDLWGY

SEQ ID NO: 434 - DNA, 435 bp, Arabidopsis thaliana
  CDS (1)..(435)
atggattacagagaatccaccggtgaaagtcagtcaaagtacaaaggaatccgtcgtcggaaatggggcaaatgggtatcagagattagagttccgggaactcgtgaccgtctctggttaggttcattctcaacagcagaaggtgccgccgtagcacacgacgttgctttcttctgtttacaccaacctgattctttagaatctctcaatttccctcatttgcttaatccttcactcgtttccagaacttctccgagatctatccagcaagctgcttctaacgccggcatggccattgacgccggaatcgtccacagtaccagcgtgaactctggatgcggagatacgacgacgtattacgagaatggagctgatcaagtggagccgttgaatatttcagtgtatgattatctgggcggccacgatcacgtttga

SEQ ID NO: 435 - protein, 144 aa, Arabidopsis thaliana
MDYRESTGESQSKYKGIRRRKWGKWVSEIRVPGTRDRLWLGSFSTAEGAAVAHDVAFFCLHQPDSLESLNFPHLLNPSLVSRTSPRSIQQAASNAGMAIDAGIVHSTSVNSGCGDTTTYYENGADQVEPLNISVYDYLGGHDHV

SEQ ID NO: 436 - DNA, 552 bp, Arabidopsis thaliana
  CDS (1)..(552)
atggctggtcttaggaattccggtaacagcgacaaagcgcaaaacgatggcaaaggtgtaccatctgcctacagaggagtccggaagagaaaatgggggaaatgggtgtctgaaatccgtgaaccggggaccaagaaccgtatctggctaggcagtttcgagactcctgaaatggctgcaaccgcatacgacgtggcagcatttcatttcagagggagagaagctcgtctcaacttccctgagctcgccagcagccttccacgtcctgcagactctagctcagacagcattcgcatggcagttcatgaggcaacactctgccgcaccaccgaaggaacagagtcagccatgcaagtggacagctcaagctcctccaatgtagctccaacaatggtcagactctcgcccagggaaattcaagcgatcaacgagtcaactttgggatctcctactacaatgatgcattcaacatacgaccctatggagtttgctaatgatgtggagatgaatgcttgggaaacataccagagtgactttctttgggacccttaa

SEQ ID NO: 437 - protein, 183 aa, Arabidopsis thaliana
MAGLRNSGNSDKAQNDGKGVPSAYRGVRKRKWGKWVSEIREPGTKNRIWLGSFETPEMAATAYDVAAFHFRGREARLNFPELASSLPRPADSSSDSIRMAVHEATLCRTTEGTESAMQVDSSSSSNVAPTMVRLSPREIQAINESTLGSPTTMMHSTYDPMEFANDVEMNAWETYQSDFLWDP

SEQ ID NO: 438 - DNA, 735 bp, Arabidopsis thaliana
  CDS (1)..(735)
atgaccgagtcatccattatctccgtcaaacaatcgtctccggtgccggaggaggaggatcatcatcatcaccaacaagactcccaccgaaccaacaccaagaaacgtgtaagatccgacccgggttaccgaggcgtccggatgcgaacgtggggcaaatgggtctccgagatccgagagcctcgcaagaagagccgaatctggctaggcactttctccacaccggaaatggcggcgcgtgcacatgacgcagctgctctcaccattaaaggaacttccgccgtcctcaacttcccggagctcgccacttaccttccccgtccagcttcctcctctccacgcgacgttcaagccgcagccgccgtagcggccgccatggacttctccccctcctcctcctctctcgtagtctccgatccaaccaccgtcatcgccccagctgagacgcagttgtcttcctcgagctattcaacgtgtacgtcatcgtcgttgtcaccgtcaagcgaagaagctgcgtcgacggcggaagaactaagcgagatagtggagttaccgagtctagagacgagttacgatgagtcattgagcgagtttgtgtacgttgactcggcgtatccacctagttcgccttggtatattaataattgttatagcttttattaccacagcgacgaaaatggcatttcgatggctgaacctttcgactcttccaattttggccccctttttccttag

SEQ ID NO: 439 - protein, 244 aa, Arabidopsis thaliana
MTESSIISVKQSSPVPEEEDHHHHQQDSHRTNTKKRVRSDPGYRGVRMRTWGKWVSEIREPRKKSRIWLGTFSTPEMAARAHDAAALTIKGTSAVLNFPELATYLPRPASSSPRDVQAAAAVAAAMDFSPSSSSLVVSDPTTVIAPAETQLSSSSYSTCTSSSLSPSSEEAASTAEELSEIVELPSLETSYDESLSEFVYVDSAYPPSSPWYINNCYSFYYHSDENGISMAEPFDSSNFGPLFP

SEQ ID NO: 440 - DNA, 582 bp, Oryza sativa (japonica cultivar-group)
  CDS (1)..(582)
atggagcaacgggcggcggcggcggcgcagcagcggcaggggaggaggcagagcgcggcggcgtgcgggatcaggcgggcgagggcggagacgcggcacccggtgtaccgcggcgtgcggttcagggcggggaagtgggtgtcggagatccgggagctccggaagccgagcaggatatggctcggcacgtacgccacccccgagatggccgccgcggcgtacgacgccgccgcactggcgctgcgcgggcgcggcgcggcgctcaacttccccgacgccgcgcggtcgcgccccgccccggcgtccgcgtccgccgacgacgtgcgcgccgcggccaccgccgccgccgccgcgatggcacaccaggaggaggacgacgacagtcggcgtcagctcgaggacgggggcggcggcggcggcgtggtggacgaggacgacgtgctggagatgccgaggctgatggtgagcatggcggaggggctgatgatcagcccaccgccggtgatgctcggcctgcaggcggacggcggtggaataatggacgagggcggcggcgtggtgaggttgtgggatcacagctga

SEQ ID NO: 441 - protein, 193 aa, Oryza sativa (japonica cultivar-group)
MEQRAAAAAQQRQGRRQSAAACGIRRARAETRHPVYRGVRFRAGKWVSEIRELRKPSRIWLGTYATPEMAAAAYDAAALALRGRGAALNFPDAARSRPAPASASADDVRAAATAAAAAMAHQEEDDDSRRQLEDGGGGGGVVDEDDVLEMPRLMVSMAEGLMISPPPVMLGLQADGGGIMDEGGGVVRLWDHS

SEQ ID NO: 442 - DNA, 585 bp, Oryza sativa (japonica cultivar-group)
  CDS (1)..(585)
atgctagctagcttgatcggtcgatcggtcatggagcagcagccgcagcagcagcaagcggcggcgccggccatggcggcgggcggcggcggcgggccgcagtacaggggggtgaggcggcggaagtgggggaagtgggtgtcggagatcaggcagcccgggaccaaggtccgcatctggctggggagcttcgactcggcggagatggcggcggtggcgcacgacgtcgcggcgctgcggctgcgcgggagggacggcgcgcagctcaacttcccgggctccgtcggctggctcccccagccggccaccaccgaccccgtcgacatccgcgccgccgccgccgaggcggccgagcgggtgcgccgcgagccggcgcttgtgtccgccgccgcctccgcggcgccgcggcggctggagctgggcggcggcgacggcgagttcgacgagatggagtcgccgaggctgtgggccgagatggcggaggccatgctgctggacccaccgaagtggggcccagatggcagcgacggggccgacggctcatcccagagctgggcccacggctcactctgggacggatgctag

SEQ ID NO: 443 - protein, 194 aa, Oryza sativa (japonica cultivar-group)
MLASLIGRSVMEQQPQQQQAAAPAMAAGGGGGPQYRGVRRRKWGKWVSEIRQPGTKVRIWLGSFDSAEMAAVAHDVAALRLRGRDGAQLNFPGSVGWLPQPATTDPVDIRAAAAEAAERVRREPALVSAAASAAPRRLELGGGDGEFDEMESPRLWAEMAEAMLLDPPKWGPDGSDGADGSSQSWAHGSLWDGC

SEQ ID NO: 444 - DNA, 555 bp, Oryza sativa (japonica cultivar-group)
  CDS (1)..(555)
atggcgtcggcggcggcggcggcggggggcggatgccagtacaggggggtgaggaggaggaagtgggggaagtgggtgtcggagatccggcagccggggaccaagacccgcatctggctcgggagcttcgagtcggcggagatggcggcggtggcgcacgacgtggcggcgctccgcctgcgcggccgcgacgcgcagctcaacttcccgggctccgtcgaccgcctgccccgcccggccagctcccgcccgggcgacatccgcgccgccgcggcggaggctgcggaccgggtgcgccgcgagcctgcgctggtcgtggtgcgcggcgccgccgccgccgccggcgagctcgcggcggtgaggtgggccggcctcgaggtcgaggtcgagcagcagctgggcgggagcgacgaggagttcgaggtggactcgccgaggctgtgggccgagatggcggaggccatgctgctggacccaccggtatgggccgtggatgtcagcgagatggaaggcccacactgctgggcccacgggtccttgtgggacgcctgctaa

SEQ ID NO: 445 - protein, 184 aa, Oryza sativa (japonica cultivar-group)
MASAAAAAGGGCQYRGVRRRKWGKWVSEIRQPGTKTRIWLGSFESAEMAAVAHDVAALRLRGRDAQLNFPGSVDRLPRPASSRPGDIRAAAAEAADRVRREPALVVVRGAAAAAGELAAVRWAGLEVEVEQQLGGSDEEFEVDSPRLWAEMAEAMLLDPPVWAVDVSEMEGPHCWAHGSLWDAC

SEQ ID NO: 446 - DNA, 955 bp, Oryza sativa
  CDS (117)..(719)
atgatcacttgcatttcatcttttcatgaacgtttttttgtgcatgttgtttactgcatttttcagtttcagctgtgtagtagcacactctgtttgcttcatcgtttgtgttcgagatggatcgagacgagagcttgggcacgcagccattgaccgggaggcgggtgcgcgcggacacaaggcacccggtgtaccgcggcatccggctccgcagcggcaagtgggtctcggagatccgcgagccgggcaagtccagcaggatctggctcggcacgtacccgacgcccgagatggccgccgcggcgtacgacgccgcggcattggcgctgcgcggcgccgacgccgcgctcaacttccccggcacggccacgtcgcgcccggcgccagcctccggctcccccgacgacatccgcgcagcggccgcggccgccgccgcgatgatcggctccggtcaccgtggcaaccagcgcgccgccgacgcgagcacgtctcgcgcggcgacggcggcgccggaggccgccgtcgccgctggggcgggcgatcagaagcgcgtcgtggacgaggacgacgtcttcgagatgccgcggctgctggtgagcatggccgagggcttgatgatgagcccgccgaggctgagcccctcgacggacggcgtcggcggcgtgtcgccggaggacgacgaggacgaggacggcatgagcctgtggaaccattcctgaaatgggcttacgggtgcatagcatttgcaggaggacaccatgtattttccatgtgttcgtatgaattctgtgcctacgtacagtacgtactcggcacgtatgcgagataggaacagagcagagcaggatactgaattttatcgtagttgtcctgttacgtgtatacggtatatatggtcactccactgatgtataagccatccgtagacgaattatggctgaaaacgatgcccctg

SEQ ID NO: 447 - protein, 200 aa, Oryza sativa
MDRDESLGTQPLTGRRVRADTRHPVYRGIRLRSGKWVSEIREPGKSSRIWLGTYPTPEMAAAAYDAAALALRGADAALNFPGTATSRPAPASGSPDDIRAAAAAAAAMIGSGHRGNQRAADASTSRAATAAPEAAVAAGAGDQKRVVDEDDVFEMPRLLVSMAEGLMMSPPRLSPSTDGVGGVSPEDDEDEDGMSLWNHS

SEQ ID NO: 448 - DNA, 597 bp, Glycine max
  CDS (1)..(597)
atggcgaaacccagcagcgaaaagccagaggagcatagcgattccaagtactacaaaggggtccgaaagagaaaatggggcaaatgggtatccgaaataagactacccaacagccgtcagaggatttggttgggatcctacgacacccccgagaaggccgcgcgtgccttcgacgcggcaatgttctgcttacgtggccgcaacgccaagtttaacttccccgacaacccacccgacatcgccggcggaacgtccatgacgccgtcgcagattcagatcgccgccgcacaattcgccaacgcggggccccacgagggacattcgggccgacccgaacatcctcccatggaatctccatcgccttctgtttcggaagggaccatccaaacggacagtgacgtccccactcttaacggttcagtaacggatttgttcacgcccgttgggtcgagtggttacgcatccgattacgggattttcccgggctttgatgatttcagtggcgatttttatgtgccggaaatgccgaacgttaattatggagaagaaaacggggaagggttcatagttgatgaatctttcttgtggaatttttga

SEQ ID NO: 449 - protein, 198 aa, Glycine max
MAKPSSEKPEEHSDSKYYKGVRKRKWGKWVSEIRLPNSRQRIWLGSYDTPEKAARAFDAAMFCLRGRNAKFNFPDNPPDIAGGTSMTPSQIQIAAAQFANAGPHEGHSGRPEHPPMESPSPSVSEGTIQTDSDVPTLNGSVTDLFTPVGSSGYASDYGIFPGFDDFSGDFYVPEMPNVNYGEENGEGFIVDESFLWNF

SEQ ID NO: 450 - DNA, 579 bp, Arabidopsis thaliana
  CDS (1)..(579)
atgaatagttcaatggcttctgccggcttaggtagccggagaaaggatccggtgtacagaggaatccggtgccgaagtgggaaatgggtctccgagattcgtgagccgaggaaaaccacgagaatctggcttggaacttaccccatggcagagatggcagcagccgcctatgatgtggctgctatggctcttaaaggaagagaagctgtcttgaacttccctggatccgtcgggtcatacccggttcctgaatcaacatccgcagcagatatacgagccgctgcggcagccgcagcagcaatgaagggatgtgaggaaggggaggaggagaaaaaggcaaaggagaagaagagtagtagttcgaagtcgagagcgcgtgagtgccacgtagataatgatgttggatcttcgtcgtggtgtgggacagagttcatggacgaagaagaagtcttgaatatgcctaatctgctggctaatatggcagaagggatgatggttgcgccgccgtcgtggatgggttctcggccgtcggatgactctccggagaattcaaatgatgaggacttgtggggctattga

SEQ ID NO: 451 - protein, 192 aa, Arabidopsis thaliana
MNSSMASAGLGSRRKDPVYRGIRCRSGKWVSEIREPRKTTRIWLGTYPMAEMAAAAYDVAAMALKGREAVLNFPGSVGSYPVPESTSAADIRAAAAAAAAMKGCEEGEEEKKAKEKKSSSSKSRARECHVDNDVGSSSWCGTEFMDEEEVLNMPNLLANMAEGMMVAPPSWMGSRPSDDSPENSNDEDLWGY

SEQ ID NO: 452 - DNA, 669 bp, Lycopersicon hirsutum
  CDS (1)..(669)
atgaatatcttcgaaacctataattcagactcattaatttcaaccgaatcatcttcttcttcatcatcatcgtcatcgtcattgttttctgaggaggaaattattttagcttcgaataacccgaaaaggccagctggcaggaagaagtttcgagaaacacgacatccgatatacaggggaatcaggaagaggaattcaggaaaatgggtttgtgaagtcagagagccaaataagaagacaaggatttggcttggtacttttcctacggctgaaatggcggctagagctcatgacgtggcggctttagcattaagaggccgttctgcttgtttgaatttctctgattcagcttggagattgcctatccctgcttcctccaactctaaagatattcaaaaggcggccgctgaggccgccgaaatcttccgaccattaaaagagtcggaagaagtttcaggagaatctgataacagtacttctcctgaaacgtcagaaaatgtgcaagagagtagtgacttcgtggatgaggaagcgatctttttcatgccaggattacttgcaaatatggcggaaggactcatgctacctccacctcaatgtgcagaaatgggagatcattatgtggaaactgatgcctacatgataactttatggaattattctatctaa

SEQ ID NO: 453 - protein, 222 aa, Lycopersicon hirsutum
MNIFETYNSDSLISTESSSSSSSSSSSLFSEEEIILASNNPKRPAGRKKFRETRHPIYRGIRKRNSGKWVCEVREPNKKTRIWLGTFPTAEMAARAHDVAALALRGRSACLNFSDSAWRLPIPASSNSKDIQKAAAEAAEIFRPLKESEEVSGESDNSTSPETSENVQESSDFVDEEAIFFMPGLLANMAEGLMLPPPQCAEMGDHYVETDAYMITLWNYSI

SEQ ID NO: 454 - DNA, 678 bp, Arabidopsis thaliana
  CDS (1)..(678)
atggtggattctcatggctccgacacggaatgttcctccaagaagaaaaaggagaaaacgaaagaaaagggggtatatcgtggggctcgcatgaggagctgggggaaatgggtctcggagattcgggagccccgtaagaaatcaagaatctggctcgggactttccccacggcggagatggcagcgcgtgcccatgatgttgcggcattgagtatcaaaggaagttccgcaatccttaacttccctgagctcgcggattttctgccaagaccagtctcgctcagccaacaggatatccaggccgcagccgccgaagccgctcttatggatttcaaaactgtaccattccatcttcaggatgactcaacgccgttgcaaactaggtgtgatactgagaagatcgaaaagtggtcatcctcatcgtcctcagcctcatcctcatcctcatcttcgtcctcgtcctcatcatctatgctttcgggggagctaggagatattgtggagttgccgagtcttgaaaacaatgtaaaatacgattgtgcgctgtatgactcgttggaggggctggtgtcgatgcccccatggttagatgctaccgaaaatgattttaggtatggagatgattcggtactgttggacccatgtctcaaagaaagctttttgtggaattatgagtaa

SEQ ID NO: 455 - protein, 225 aa, Arabidopsis thaliana
MVDSHGSDTECSSKKKKEKTKEKGVYRGARMRSWGKWVSEIREPRKKSRIWLGTFPTAEMAARAHDVAALSIKGSSAILNFPELADFLPRPVSLSQQDIQAAAAEAALMDFKTVPFHLQDDSTPLQTRCDTEKIEKWSSSSSSASSSSSSSSSSSSSMLSGELGDIVELPSLENNVKYDCALYDSLEGLVSMPPWLDATENDFRYGDDSVLLDPCLKESFLWNYE

SEQ ID NO: 456 - DNA, 606 bp, Oryza sativa
  CDS (1)..(606)
atggaggtggtggtgatgcagaacggcggcggcggcggcggcggggagatggcggggcagtaccgaggggtgaggaagaggaagtgggggaagtgggtgtcggagatcagggagcccgggaagaagacgcgcatctggctcgggagcttcgagtcgccggagatggccgccgtggcgcacgacgtggccgcgctccgcctccgggggcgggacgcgcgcctcaacttcccggcgatcgcccaccgcttccgccgcccggacaccgccgagcccggcgacgtccgcgccgccgcgctcgaggccgccgcccaggtccgcttcacccccgacctcctcgtcgtcgccggcggagacgacgccagacgacgatgctgctccgccggcgaggccgaggcggcggcggtggcggcggcggcgtgggagtgggacgtggtggtcggcggcggcggcgacgagctggaggccaagtcgcccaacatgtgggctgagctggcggaggccatgctgatggccccacctgtctgggagggaggaggagagacggacaatgacgagtgggcccagcaagcggcatccctctgggacccatctgtctgggactactga

SEQ ID NO: 457 - protein, 201 aa, Oryza sativa
MEVVVMQNGGGGGGGEMAGQYRGVRKRKWGKWVSEIREPGKKTRIWLGSFESPEMAAVAHDVAALRLRGRDARLNFPAIAHRFRRPDTAEPGDVRAAALEAAAQVRFTPDLLVVAGGDDARRRCCSAGEAEAAAVAAAAWEWDVVVGGGGDELEAKSPNMWAELAEAMLMAPPVWEGGGETDNDEWAQQAASLWDPSVWDY

SEQ ID NO: 458 - DNA, 582 bp, Oryza sativa
  CDS (1)..(582)
atggagcaacgggcggcggcggcggcgcagcagcggcaggggaggaggcagagcgcggcggcgtgcgggatcaggcgggcgagggcggagacgcggcacccggtgtaccgcggcgtgcggttcagggcggggaagtgggtgtcggagatccgggagctccggaagccgagcaggatatggctcggcacgtacgccacccccgagatggccgccgcggcgtacgacgccgccgcactggcgctgcgcgggcgcggcgcggcgctcaacttccccgacgccgcgcggtcgcgccccgccccggcgtccgcgtccgccgacgacgtgcgcgccgcggccaccgccgccgccgccgcgatggcacaccaggaggaggacgacgacagtcggcgtcagctcgaggacgggggcggcggcggcggcgtggtggacgaggacgacgtgctggagatgccgaggctgatggtgagcatggcggaggggctgatgatcagcccaccgccggtgatgctcggcctgcaggcggacggcggtggaataatggacgagggcggcagcgtggtgaggttgtgggatcacagctga

SEQ ID NO: 459 - protein, 193 aa, Oryza sativa
MEQRAAAAAQQRQGRRQSAAACGIRRARAETRHPVYRGVRFRAGKWVSEIRELRKPSRIWLGTYATPEMAAAAYDAAALALRGRGAALNFPDAARSRPAPASASADDVRAAATAAAAAMAHQEEDDDSRRQLEDGGGGGGVVDEDDVLEMPRLMVSMAEGLMISPPPVMLGLQADGGGIMDEGGSVVRLWDHS

SEQ ID NO: 460 - DNA, 978 bp, Glycine max
  CDS (77)..(778)
tgtcactgtcatagggacatacatacattttcaccttcacacatcaaaccaacaagaactttctattccttaaaccatggtcgagcctgcagtagcagcaagctcagaattatcagactcaacacgaaacaccaacaccaacaccccttcaccctcttcctcatcgtcgttatctccgtcgccatcaccgtcatcatcaagctctaaaaagcgagcgagagacaacaacaatagtagaaacaacagcaacaagcattctgtgtatagaggtgtccgaatgcgcacgtggggcaaatgggtgtcggaaatccgcgagccgcgaaagaagaaccgaatctggctcggcaccttcgccaccgccgagatggcggcgcgtgcccacgacgtggcggcgctgacgataaaaggctcatccgccatccttaacttccccgaactcgccgcctccctgccccggccggcctccaactcgccccgcgacgtgcaggccgcggcagccaaggcggcgtccatggaggcgccgccgcggacccctccgtcgccggccgccacgccggaggatgacctcggcgagatcgtggagctgccgccgctcggaacgagtttcgactcgcccgaccggagttccgagtttgtgttcctggacatggacgacgggtggccctattctcacccgtggtaccacagcatttatgatggtgggtacttcattagcgacatgaacaacatggtttcgatgcaagagtcagagagcatggttctttccctgtggccttgaagttaagccaatgctactcattgcagtatggttatattttggttctttttttttttttttgcgtgagacagataatcatgtttctgttcttaagtatgcgattagggattggattttcatgtccgtatatatgaaataacatttatttgccgatatcaatctcttgaatgaacatcaatacattgaaaaaaaaaaaaaaa

SEQ ID NO: 461 - protein, 233 aa, Glycine max; identical to SEQ ID NO: 429

SEQ ID NO: 462 - DNA, 799 bp, Helianthus annuus
  CDS (169)..(642)
cccacctccataaaaaccatctcttttcatggcggccagttttcatttaatcccataatatttatttatacacacgaccacttgtatacgtacctcacacttttccttttccttttaaaaggtgtcggtgttttcgaccatcttctccttttccaatcaccaaaaccaatggaagccatcatcaccggcggcggagatgggccgtgcaaccgtccgccggagaaaaggaagagtgatcaacggccgtacaaggggatacgcatgaggaagtggggaaaatgggtggcggagattcgggagccgaataagcggtccaggatttggttggggtcctattcgacgcccgtggccgctgcacgggcgtacgacacggccgtatactacctacggggcccgacggccaggttgaattttcccgaattattggggtctgacgtggcgttcggggagttgtcggcggcgagtattcggaaaaaggcgatagaggttggggccagagtggatgcagagacgagttgtacgtcgttgcttaggagtggtacgcgtgtacccgggtctgggcttaaggcgtgttggtttcaggagaaacccgacttgaatatgaaacccgaacccgaggagaatgatggagattattggtgatggatacaatacgaggatgggttggtttggtgggtcggtcggtcggggcagttggatggaagatattttctttctttttttttttaagtgaagtgttttgttatcttggaaacagatgaaacaagttttgatgtttacaaggaaaaaaaaaaaaaaa

SEQ ID NO: 463 - protein, 157 aa, Helianthus annuus
MEAIITGGGDGPCNRPPEKRKSDQRPYKGIRMRKWGKWVAEIREPNKRSRIWLGSYSTPVAAARAYDTAVYYLRGPTARLNFPELLGSDVAFGELSAASIRKKAIEVGARVDAETSCTSLLRSGTRVPGSGLKACWFQEKPDLNMKPEPEENDGDYW

SEQ ID NO: 464 - DNA, 534 bp, Brassica napus
  CDS (1)..(534)
atggatcagggaccgtcgtcgtcaaagtacaaaggcgtgaggaagaggaagtgggggaagtgggtttcggagatcagacttcccaacagcagagagcgtatctggttgggatcttacgactctcccgagaaggcggcgcgcgccttcgacgccgctctttactgcctccgaggaagcggcaccaagttcaatttcccggataatcctccggcgatcagcggcggagggaacatgtcgcgatcggagatccgagacgccgccgcgaggttcgctaattcggaagagagtgtggcgagtgagatggtggtgcagcagcaagagtctccttcgacgacgatggcgattgattcggagtttttgagtatgcttccgacggtcgggtcgggtaattttgcttcggatttcgggttgtttcccgggttcgatgatttcgcggacgaatttttaggtgatcgttttgtagaacaggtttcgcctacgtggaatggggatgagagttgttatgatggctctgtgtctctttggaatttttga

SEQ ID NO: 465 - protein, 177 aa, Brassica napus
MDQGPSSSKYKGVRKRKWGKWVSEIRLPNSRERIWLGSYDSPEKAARAFDAALYCLRGSGTKFNFPDNPPAISGGGNMSRSEIRDAAARFANSEESVASEMVVQQQESPSTTMAIDSEFLSMLPTVGSGNFASDFGLFPGFDDFADEFLGDRFVEQVSPTWNGDESCYDGSVSLWNF

SEQ ID NO: 466 - DNA, 630 bp, Brassica napus
  CDS (1)..(630)
atgagtcaagacaccaaaaaagagaagacgaacgcggttagagattccggtaagcatccggtttaccgaggtgtccgaaagaggaactgggggaaatgggtgtcggagataagagagccgaggaagaaatctcgtatatggctcggaacgtttccttccccggagatggcggcgcgtgcacacgacgtagccgctttgagcatcaaaggagcctctgcgatactcaacttccctgacctcgccggttctttcccacggccaagctctctcagccctcgagacatccaagccgcagctctcaaagctgcacacatggaaatcatcatgaccccctcacagtcttctacttcttcttcatcttttacgttttcttcctcacagtcgtcttcttctctggagtctcttgtgtcttcttcagggacaggctctgaggagctaggggagattgttgagctgccgagtttagggtcgagctatgatggcacgactcagctaagtaacgagttcattttctctgacccggcagacttttgggtttatccacctcaccagttgttagaaggtgattatgagatgattcctggctcattttcacaggattgggatctttcaggactgtttaattattaa

SEQ ID NO: 467 - protein, 209 aa, Brassica napus
MSQDTKKEKTNAVRDSGKHPVYRGVRKRNWGKWVSEIREPRKKSRIWLGTFPSPEMAARAHDVAALSIKGASAILNFPDLAGSFPRPSSLSPRDIQAAALKAAHMEIIMTPSQSSTSSSSFTFSSSQSSSSLESLVSSSGTGSEELGEIVELPSLGSSYDGTTQLSNEFIFSDPADFWVYPPHQLLEGDYEMIPGSFSQDWDLSGLFNY

SEQ ID NO: 468 - DNA, 435 bp, Brassica napus
  CDS (1)..(435)
atggattacatcgacaacaccgtcgaaactcaatcaaagtacaaaggcatccgtcgccggaaatggggaaaatgggtatcggagattagagttccgggaactcgagaccgtctctggttaggctcattctccaccgcagaaggcgcagccgtagcgcacgacgtagctttctactgtttacaccaaccaaactcgctcgaatctctcaacttccctcacttgcttcctccttccatagtttccaagacttcgccgaggtctatccagcaagctgcttctaatgccggaatggccgttgacgccggaatcgttaacagctgtgatcacgcgtccgggaactctgggaatggagatacaacgacggcgtattgtgagaatggaggtgcgttgaatatatcagtgtatgattatttggacggtcacgatcacgtttga

SEQ ID NO: 469 - protein, 144 aa, Brassica napus
MDYIDNTVETQSKYKGIRRRKWGKWVSEIRVPGTRDRLWLGSFSTAEGAAVAHDVAFYCLHQPNSLESLNFPHLLPPSIVSKTSPRSIQQAASNAGMAVDAGIVNSCDHASGNSGNGDTTTAYCENGGALNISVYDYLDGHDHV

SEQ ID NO: 470 - DNA, 585 bp, Brassica napus
  CDS (1)..(585)
atggcgaagaaagcgatgaaggaggaagaagaagagaatcgaaactcgtcgatgcagtcaaagtacagaggcgtgaggaagaggaaatgggggaagtgggtgtcggagatcagacttccacacagcagagaacgcatctggttaggctcttacgacactcccgagaaggcggcgcgtgccttcgacgccgctcagttttgtctccgcggcggcggttccgcattcaatttccccgataacccaccgtcgatctccggcggaaggtcgttgacggcgacggagattcgagaagctgctgctaggttcgccaacgctcaggacgatgttattagtgtccggggagaagaatcgggtttgtccgaaatccgaccggagtctccttcttcaacctccgtgtctgaagtggatacatcgtcagcgacaacgctggattgcgatctgtcgttgtttgatatgcttcctgcagattttgggacgtttccagggttagatgacttctcctgtgatggatttacagagattttacccattgaagattacggagaagagatttttgatggatctttttttctttggggcttttaa

SEQ ID NO: 471 - protein, 194 aa, Brassica napus
MAKKAMKEEEEENRNSSMQSKYRGVRKRKWGKWVSEIRLPHSRERIWLGSYDTPEKAARAFDAAQFCLRGGGSAFNFPDNPPSISGGRSLTATEIREAAARFANAQDDVISVRGEESGLSEIRPESPSSTSVSEVDTSSATTLDCDLSLFDMLPADFGTFPGLDDFSCDGFTEILPIEDYGEEIFDGSFFLWGF

SEQ ID NO: 472 - DNA, 435 bp, Brassica napus
  CDS (1)..(435)
atggattacatcgacaacaccgtcgaaactcaatcaaagtacaaaggcatccgtcgccggaaatgggggaaatgggtatcggagattcgagttccgggaactcgcgaccgtctctggttaggctcattctccacggcggaaggcgcagccgtggcgcacgacgtggctttctactgtttacaccaaccaaactcgctcgaatctctcaacttccctcacttgcttcctccttccatagtttccaagacttcgccgaggtctatccagcaagctgcttctaatgccggaatggccgttgacgccggaatcgttaacagctgtgatcacgcgtccgggaactctgggaatggagatacaacgacggcgtattgtgagaatggaggtgcgttgaatatatcagtgtatgattatttggacggtcacgatcacgtttga

SEQ ID NO: 473 - protein, 144 aa, Brassica napus; identical to SEQ ID NO: 469

SEQ ID NO: 474 - DNA, 594 bp, Brassica napus
  CDS (1)..(594)
atggtgaagaaagcgatgaaggaggaagaagaagcagagatgagaaactcgtcgatgcagtcaaagtacaaaggcgtgaggaagaggaagtggggcaaatgggtttcggagatcagacttcccaacagcagagagcgaatctggctaggctctttcgacactcccgagaaggcggcgcgtgccttcgacgccgcccagttttgtctccgcggctgccaatccggtttcaatttccccgataatccgccgtcgatctccggcggaaggtcgctgacgcctccggagatccgggaagcggctgctcgatacgcaaacgctcaggacgacgatattatcatcaccaccggagaagaagaatcggttttgtccgaaacccgaccggagtctccttcaacaacctccgtgtctgaagcagatacgtcgctggattgcgatctatcgttcttagacacgcttcctaatgatttcgggatgttttctgtgtttgatgacttctccgacggcttctccggcgatcagtttacagaggttttacccgttgaagattacggagatgtgatttttgatgagtctctgtttctttgggatttttaa

SEQ ID NO: 475 - protein, 197 aa, Brassica napus
MVKKAMKEEEEAEMRNSSMQSKYKGVRKRKWGKWVSEIRLPNSRERIWLGSFDTPEKAARAFDAAQFCLRGCQSGFNFPDNPPSISGGRSLTPPEIREAAARYANAQDDDIIITTGEEESVLSETRPESPSTTSVSEADTSLDCDLSFLDTLPNDFGMFSVFDDFSDGFSGDQFTEVLPVEDYGDVIFDESLFLWDF

SEQ ID NO: 476 - DNA, 612 bp, Brassica napus
  CDS (1)..(612)
atggatcactcatcttcttcggaatcacatcttgatgactacaggagaaggcctcaggccaaggccacagcgagagcagtgaataataataaaaatatcaagaagaaaagagtcaaagaagatcttgatgatgatgaaaagattaatgtttcaaagcatcaaagttttagaggggtgagaatgaggcaatggggaaaatgggtctcggagatcagagagccaaagaagaaatctagaatctggcttggtaccttccccacggcggagatggctgctcgtgctcacgacgtggcggctttagccataaaaggtgactctgctcatctcaacttcccggagctagcctaccacctccctagaccggctagtgcccaccctaaagacatccaagcagccgcagcggaggctgcagcttcagtagtcattgatatggacatagagacgtcgtcaccttctaccggagccacggaactgtcgcctcctgctgtggcctcaacagccgatgacgcgttctccgaccttccggacctcttcctcgacgtgaaccacaaaaacgatggcttttgggagtccttcccttacgaggaacccttcttctcgggaagttactag

SEQ ID NO: 477 - protein, 203 aa, Brassica napus
MDHSSSSESHLDDYRRRPQAKATARAVNNNKNIKKKRVKEDLDDDEKINVSKHQSFRGVRMRQWGKWVSEIREPKKKSRIWLGTFPTAEMAARAHDVAALAIKGDSAHLNFPELAYHLPRPASAHPKDIQAAAAEAAASVVIDMDIETSSPSTGATELSPPAVASTADDAFSDLPDLFLDVNHKNDGFWESFPYEEPFFSGSY

SEQ ID NO: 478 - DNA, 633 bp, Brassica napus
  CDS (1)..(633)
atggtgaaacaagaactcaatatcaagaaggaaatgtcattgtcacctccgtcttctccaaagatcaagagcaagaagaataagattaagaagtacaaaggagtgaggatgagaagttggggatcatgggtgtctgagattagggcaccaaataaaaagataaggatttggttgggctcttactcaacagctgaagcagcagctagggcttatgatgttgcactcttgtgtctaaaaggccctcaagccaatctcaacttccccagctctgcttcttctcgccttctgttagatgaaaagacccatttgtcccccaaatccatccaaaaaattgccgctcaagcagccaacaattcatttgacctttttgctccatcttcatcggcagattcgtcaccgttcgatcatgatcaacatcctgatgacatgcaatctttgatagggtctttcgtagacaatcgtgtgtctttgatggatccatcatcatcgtggtatgataatgatcataatgggatgttcttcttcgatgatggagctccgtttaattactctcctccactgaactcgaccacgaatatggtcgatgggtatttctacgaagatgctgatattccactttggagtttcagttga

SEQ ID NO: 479 - protein, 210 aa, Brassica napus
MVKQELNIKKEMSLSPPSSPKIKSKKNKIKKYKGVRMRSWGSWVSEIRAPNKKIRIWLGSYSTAEAAARAYDVALLCLKGPQANLNFPSSASSRLLLDEKTHLSPKSIQKIAAQAANNSFDLFAPSSSADSSPFDHDQHPDDMQSLIGSFVDNRVSLMDPSSSWYDNDHNGMFFFDDGAPFNYSPPLNSTTNMVDGYFYEDADIPLWSFS

SEQ ID NO: 480 - DNA, 705 bp, Glycine max
  CDS (1)..(705)
atggttaagtcagaacacaagatcaaaacagaaccatcatcaaaggaaatgcggttatcttcaccctcatcatcaacatcaacatcatcagattgcaagaagaagaagtacaagggagtgagaatgaggagctggggatcatgggtgtctgagattagagcaccaaaccagaaaacaagaatatggttaggctcttattcaaccccagaagctgcagctagagcctatgatgctgcacttctatgccttaaaggctcctcagcaaatctcaatttccctttaagctcttcacaacaatacattcctggagatgctgtcatgtcccccaaatcaatccaaagagttgctgcggccgccgcatatagtttcatcgacaatgccaccactcccccttccccacctccggcttcgaccccatcatcatcatcattggcctcatccccctcattggtttcttctccctcggatcaaatcgatgacgacgccttgctgatatcgtctttccaagcctacactagttgtggtcaagcaaatcaatcaatggctgtgaatgtgatggagccttggtacacctttggtgatggtcttcaatcccccaagtatgctgatcagatgctaagtggtgatttcttccatgtcgattcttcccatctgcttgatgatctatacgaagaaagtgacattcgtttgtggagcttctgctga

SEQ ID NO: 481 - protein, 234 aa, Glycine max
MVKSEHKIKTEPSSKEMRLSSPSSSTSTSSDCKKKKYKGVRMRSWGSWVSEIRAPNQKTRIWLGSYSTPEAAARAYDAALLCLKGSSANLNFPLSSSQQYIPGDAVMSPKSIQRVAAAAAYSFIDNATTPPSPPPASTPSSSSLASSPSLVSSPSDQIDDDALLISSFQAYTSCGQANQSMAVNVMEPWYTFGDGLQSPKYADQMLSGDFFHVDSSHLLDDLYEESDIRLWSFC

SEQ ID NO: 482 - DNA, 567 bp, Glycine max
  CDS (1)..(567)
atgcgttccagcaacggtgcatcaagcagcagagcctccaatgctaacactgggcgccaccctgtgtaccgtggagtgaggcgtaggagtagtggcaaatgggtttctgaaatccgtgaacccaaaaaacctaacaggatttggttagggacatttgccacccctgaaatggctgctattgcctatgacgtggcagcgcttgctcttaagggtaaggatgctgaactcaacttccctaactcggcttcctccctccccgtccccacatcatctgctgctcgcgacattcagatggctgcggctagcgccgcagccgctgtcggagctgcgaatgatgcacttgaaggaagccgaggagggaatgcttcggtttcattgacggaagagttttcagggggaaatttgaaccactttgtggatgaggacttgatctttgacatgccgaatattctggtcaatatggctgaaggaatgctactgagtcctcctcgttttgataattttgctgctaccgactatgaatacatggatgaagatcctaacctctgggggttccctaattactag

SEQ ID NO: 483 - protein, 188 aa, Glycine max
MRSSNGASSSRASNANTGRHPVYRGVRRRSSGKWVSEIREPKKPNRIWLGTFATPEMAAIAYDVAALALKGKDAELNFPNSASSLPVPTSSAARDIQMAAASAAAAVGAANDALEGSRGGNASVSLTEEFSGGNLNHFVDEDLIFDMPNILVNMAEGMLLSPPRFDNFAATDYEYMDEDPNLWGFPNY

SEQ ID NO: 484 - DNA, 534 bp, Glycine max
  CDS (1)..(534)
atggagggtgaaggaagaagaagagaaggaggagagagagaaacagcaacagcagcagcaacgaggaaggtggtggagggtgctgatcagagaagatacaaaggaataaggatgaggaagtggggcaagtgggtcgctgaaattagagaacccaataagcgttcaaggatttggctcggttcctattctacccctgtcgcagccgcacgtgcctacgacaccgccgtcttttaccttcgaggaccctccgcgcgtcttaacttcccggagcttctcatcggagaaggcgccgccgccctcaccggcggctgtgacatgtcagcagcttctattaggaagaaggcctccgaggtcggtgctagagtcgatgctcttcaggcaacccttcaccaccatcaccaccatgttgtgccaccacggcagcttctctctgccagctgtggcggtgggtccggtgattttgcagtgcgggttgttgacctgaataagatgcccgaacccgagagctccgactgtgagtggaacgtgaattga

SEQ ID NO: 485 - protein, 177 aa, Glycine max
MEGEGRRREGGERETATAAATRKVVEGADQRRYKGIRMRKWGKWVAEIREPNKRSRIWLGSYSTPVAAARAYDTAVFYLRGPSARLNFPELLIGEGAAALTGGCDMSAASIRKKASEVGARVDALQATLHHHHHHVVPPRQLLSASCGGGSGDFAVRVVDLNKMPEPESSDCEWNVN

SEQ ID NO: 486 - DNA, 642 bp, Glycine max
  CDS (1)..(642)
atggatcaagaaacaacaagaagaaacaccatgcaagaatgtcatgtgatagccccaacaacaacaacggcaacatcatcgtatcgtggagttcgtcagcgaaaatggggcaaatgggtgtccgaaatccgtgagcctggaaagaagagcagaatatggttagggagctatgagtcaccagagatggctgcagcagcatatgacgtggcagcgttacaccttcggggacgagctgcaagactcaatttccccgaattagttgagacgctgccacgtccaacgagttcgaaacccgaagatgtccaagtggcagcacaacaagcggcggtgatgttcagaatatcaccaacaatgtcacctattaacaatcatcaaggatgtgtcaatgacaataacattattaagggtagtgtggttcctgtgagagtgggactctcacccacacaaattcaggccatcaatgagtccccattggactcaccaaagatgtggatggtgcaaatggcagaggcactcaggtttggtttcgatgatcactctatgatgatgctgccttctgatgatgatgattatgctttggagttgagtggatgggaagaaatacagcatgaatctttatgggactctccagaatatatgtaa

SEQ ID NO: 487 - protein, 213 aa, Glycine max; identical to SEQ ID NO: 421

SEQ ID NO: 488 - DNA, 699 bp, Glycine max
  CDS (1)..(699)
atggtcatggaagaatctaaccctttagacaatgaagttcaaccaaccacttcatcatcctctttcaccattactactccctctacctcctcttcctcctccatagaagaagccactaacactactactaaggagaaaaagaagaagagagccattagtaatattgaagggaagcaccctacgtatagaggagtacgtatgcgtcaatggggcaaatgggtatccgaaattagagagccaaggaagaaatcaagaatttggcttggaacttttcccactcccgatatggcggctcgagcccatgatgtggcggctctcacgatcaaaggcagctcggcttacctcaatttccccgaattagccgccaagctgccccgccccgccagcacctcccccaaggacatccaagctgcggcggctaaagcctccgccttggatttcggtcaccaaagccatgaagccgaatccgagctgagccaagccgtttcctcctcaatccaaacacaatcatcatcatcatcatccaattcatcgttgaagggtgtggatgacacattcttggaccttcctgatctctctcttgacttgagccatggagccgatgagtttcattattcatcggcttggcttgtagccggagccgaacatatagagctgggtttccggcttgaggaaccttttctttgggaatcatattaa

SEQ ID NO: 489 - protein, 232 aa, Glycine max; identical to SEQ ID NO: 415

SEQ ID NO: 490 - DNA, 699 bp, Glycine max
  CDS (1)..(699)
atggtcatggaagaatctaaccctttagacaatgaagttcaaccaaccacttcatcatcctctttcaccattactactccctctacctcctcttcctcctccatagaagaagccactaacactactactaaggagaaaaagaagaagagagccattagtaatattgaagggaagcaccctacgtatagaggagtacgtatgcgtcaatggggcaaatgggtatccgaaattagagagccaaggaagaaatcaagaatttggcttggaacttttcccactcccgatatggcggctcgagcccatgatgtggcggctctcacgatcaaaggcagctcggcttacctcaatttccccgaattagccgacaagctgccccgccccgccagcacctcccccaaggacatccaagctgcggcggctaaagcctccgccttggatttcggtcaccaaagccatgaagccgaatccgagctgagccaagccgtttcctcctcaatccaaacacaaccatcatcatcatcatccaattcatcgttgaagggtgtggatgacacattcttggaccttcctgatctctctcttgacttgagccatggagccgatgagtttcattattcatcggcttggcttgtagccggagccgaacatatagagctgggtttccggcttgaggaaccttttctttgggaatcatattaa

SEQ ID NO: 491 - protein, 232 aa, Glycine max
MVMEESNPLDNEVQPTTSSSSFTITTPSTSSSSSIEEATNTTTKEKKKKRAISNIEGKHPTYRGVRMRQWGKWVSEIREPRKKSRIWLGTFPTPDMAARAHDVAALTIKGSSAYLNFPELADKLPRPASTSPKDIQAAAAKASALDFGHQSHEAESELSQAVSSSIQTQPSSSSSNSSLKGVDDTFLDLPDLSLDLSHGADEFHYSSAWLVAGAEHIELGFRLEEPFLWESY

SEQ ID NO: 492 - DNA, 576 bp, Glycine max
  CDS (1)..(576)
atggagcaagagcttccacgcagtagcgtccccgacgacgccaccgccgccaccacgagctccgttgacaagcccgccactcctcacgccggaggcacccgccacccgctcttccgcggcgtccgcaagcgccgctggggcaaatgggtctccgaaatccgggagccgaggaaaaagtcacgcatatggctcggctccttcccggcgccggagatggcggcgaaggcctacgacgttgccgcctactgcctcaagggctgcaaggcgcagctcaacttccccgacgaggtccaccggcttccgccgctcccctcctcctgcaccgcccgggacatccaggccgccgcagccaaggccgcccacatgatgatggtccaggctgcctccgccgactcgccggagaaaagcagcagcattacctccgactgcgacggcagcggtggtgacgacttctggggcgaaattgagctgccagaactgctcaacggcaagtggtgggcctccgaccgccacgtaacgccgtggccggagactgagcttacggcccagctgcccttcaccacggcgtgcttgtag

SEQ ID NO: 493 - protein, 191 aa, Glycine max
MEQELPRSSVPDDATAATTSSVDKPATPHAGGTRHPLFRGVRKRRWGKWVSEIREPRKKSRIWLGSFPAPEMAAKAYDVAAYCLKGCKAQLNFPDEVHRLPPLPSSCTARDIQAAAAKAAHMMMVQAASADSPEKSSSITSDCDGSGGDDFWGEIELPELLNGKWWASDRHVTPWPETELTAQLPFTTACL

SEQ ID NO: 494 - DNA, 474 bp, Helianthus annuus
  CDS (1)..(474)
atggaagccatcatcaccggcggcggagatgggccgtgcaaccgtccgccggagaaaaggaagagtgatcaacggccgtacaaggggatacgcatgaggaagtggggaaaatgggtggcggagattcgggagccgaataagcggtccaggatttggttggggtcctattcgacgcccgtggccgctgcacgggcgtacgacacggccgtatactacctacggggcccgacggccaggttgaattttcccgaattattggggtctgacgtggcgttcggggagttgtcggcggcgagtattcggaaaaaggcgatagaggttggggccagagtggatgcagagacgagttgtacgtcgttgcttaggagtggtacgcgtgtacccgggtctgggcttaaggcgtgttggtttcaggagaaacccgacttgaatatgaaacccgaacccgaggagaatgatggagattattggtga

SEQ ID NO: 495 - protein, 157 aa, Helianthus annuus; identical to SEQ ID NO: 463

SEQ ID NO: 496 - DNA, 618 bp, Helianthus annuus
  CDS (1)..(618)
atgaatcacaacaccgccaccgctaccacaaccaccaccaaacgccccaaacccggggaccttaacgatgaagttacaaaaaaaacaaagaaaaccgacattgatcaaataaaccaccctgtataccgcggtgtacgcaagcggagttggggaaaatgggtgtcagaaatccgcgagccaaagaaaaaatcaagaatatggcttgggacttttgacaccccagagatggcggcccgggcccatgatgtagctgcggtcgccatcaaaggtaactcggccatcctcaacttccctgagctggctcaccaactccccaagccggcttcaaactcccctagagatatccaagccgcggctcttaaagccgccacgttggtccttcgaagccttaattccgataaagatgatcaatccgagccaacccggattgatcaacttccatgttcttcgtcttcatcttcatgttcacttcaaagtgatataacggatgacccgtttcttgatttgccggatctttatatggacctcgggtaccggatttttaacacattgtcagagaagattactggtaacaatgaattctggccagaagatcatttcttgtggagctatagctaa

SEQ ID NO: 497 - protein, 205 aa, Helianthus annuus
MNHNTATATTTTTKRPKPGDLNDEVTKKTKKTDIDQINHPVYRGVRKRSWGKWVSEIREPKKKSRIWLGTFDTPEMAARAHDVAAVAIKGNSAILNFPELAHQLPKPASNSPRDIQAAALKAATLVLRSLNSDKDDQSEPTRIDQLPCSSSSSSCSLQSDITDDPFLDLPDLYMDLGYRIFNTLSEKITGNNEFWPEDHFLWSYS

SEQ ID NO: 498 - DNA, 627 bp, Zea mays
  CDS (1)..(627)
atggaccagatgctgggcaagcacctgcagatgccttccgtgactacgagcgccgcctgccagcagccgcagtcgccgccgccgtcgccgcagcagcagtaccggggcgtgcggaagcgcaagtggggcaagtgggtgtcggagatccggcagccgggcaccaagacgcgcatctggctcggcagcttcgagtcggccgagatggccgcggtggcgcacgacgtggcggcgctgcgcctgcggggccgcgacgcgcagctcaacttcccgggctgcgtcgcctggctgccccgcccggcgacctcgcacgcgcgcgacgtccgcgccgcggcggccgaggccgccgaccgcgtgcgctgcgacccggcgctgctgctgctccagcaggcggcggcagcgcggtgccacgactacgaccacgaccacgagttcggggccgggccggcgccggtggtcgagctcgggaacgacgaggagttcgagctggacctggactcgcccagcctctgggccgagatggcggaggccatgctcctggacccgccgggctgggccaccggcgtcgtcggcgacccggcggaggtggccctgtgctggccacacggctccctctgggacgcctgctag

SEQ ID NO: 499 - protein, 208 aa, Zea mays
MDQMLGKHLQMPSVTTSAACQQPQSPPPSPQQQYRGVRKRKWGKWVSEIRQPGTKTRIWLGSFESAEMAAVAHDVAALRLRGRDAQLNFPGCVAWLPRPATSHARDVRAAAAEAADRVRCDPALLLLQQAAAARCHDYDHDHEFGAGPAPVVELGNDEEFELDLDSPSLWAEMAEAMLLDPPGWATGVVGDPAEVALCWPHGSLWDAC

SEQ ID NO: 500 - DNA, 633 bp, Zea mays
  CDS (1)..(633)
atggaccagatgctgggcaagcacctgcagatgccttccatgactacgagcgccgcctgccagcagccgcagtcgccgccgccgtcgccgcagcagcagcagcagtaccggggcgtgcggaagcgcaagtggggcaagtgggtgtcggagatccggcagccgggcaccaagacgcgcatctggctcggcagcttcgagtcggccgagatggccgcggtggcgcacgacgtggcggcgctgcgcctgcggggccgcgacgcgcagctcaacttcccgggctgcgtcgcctggctgccccgcccggcgacctcgcacgcgcgcgacgtccgcgccgcggcggccgaggccgccgaccgcgtgcgctgcgacccggcgctgctgctgctccagcaggcggcggcagcgcggtgccacgactacgaccacgaccacgagttcggggccgggccggcgccggtggtcgagctcgggagcgacgaggagttcgagctggacctggactcgcccagcctctgggccgagatggcggaggccatgctcctggacccgccgggctgggccaccggcgtcgtcggcgacgcggcggaggtggccctgtgctggccacacggctccctctgggacgcctgctag

SEQ ID NO: 501 - protein, 210 aa, Zea mays
MDQMLGKHLQMPSMTTSAACQQPQSPPPSPQQQQQYRGVRKRKWGKWVSEIRQPGTKTRIWLGSFESAEMAAVAHDVAALRLRGRDAQLNFPGCVAWLPRPATSHARDVRAAAAEAADRVRCDPALLLLQQAAAARCHDYDHDHEFGAGPAPVVELGSDEEFELDLDSPSLWAEMAEAMLLDPPGWATGVVGDAAEVALCWPHGSLWDAC

SEQ ID NO: 502 - DNA, 29 bp, Artificial sequence
  primer
atagagctcgttgtcctacagaggcattc

SEQ ID NO: 503 - DNA, 29 bp, Artificial sequence
  primer
atacccgggccagactcgagagctggttc

SEQ ID NO: 504 - DNA, 22 bp, Artificial sequence
  primer
atggaaaacacttacgttggcc

SEQ ID NO: 505 - DNA, 25 bp, Artificial sequence
  primer
tcaattattagaattccatatggac

SEQ ID NO: 506 - DNA, 29 bp, Artificial sequence
  primer
ataccatgggttgtcctacagaggcattc

SEQ ID NO: 507 - DNA, 31 bp, Artificial sequence
  primer
atattaattaaccagactcgagagctggttc

SEQ ID NO: 508 - DNA, 29 bp, Artificial sequence
  primer
ataggtaccgttgtcctacagaggcattc

SEQ ID NO: 509 - DNA, 29 bp, Artificial sequence
  primer
atagtcgacccagactcgagagctggttc

SEQ ID NO: 510 - protein, 88 aa, Artificial sequence
  consensus sequence
  Variant (2)..(2): Xaa in position 2 is any amino acid
  Variant (4)..(4): Xaa in position 4 is any amino acid
  Variant (6)..(6): Xaa in position 6 is any amino acid
  Variant (8)..(8): Xaa in position 8 is any amino acid
  Variant (18)..(18): Xaa in position 18 is any amino acid
  Variant (20)..(23): Xaa in position 20 to 23 is any amino acid
  Variant (29)..(33): Xaa in position 29 to 33 is any amino acid
  Variant (35)..(35): Xaa in position 35 is any amino acid
  Variant (38)..(38): Xaa in position 38 is any amino acid
  Variant (40)..(40): Xaa in position 40 is any amino acid
  Variant (42)..(42): Xaa in position 42 is any amino acid
  Variant (44)..(48): Xaa in position 44 to 48 is any amino acid
  Variant (50)..(51): Xaa in position 50 to 51 is any amino acid
  Variant (52)..(53): Xaa in position 52 to 53 is any or no amino acid
  Variant (55)..(55): Xaa in position 55 is any amino acid
  Variant (60)..(77): Xaa in position 60 to 77 is any amino acid
  Variant (78)..(83): Xaa in position 78 to 83 is any or no amino acid
  Variant (86)..(87): Xaa in position 86 to 87 is any amino acid
YXGXRXRXWGKWVSEIRXPXXXXRIWLGXXXXXEXAAXAXDXAXXXXXGXXXXAXLNFPXXXXXXXXXXXXXXXXXXXXXXXXAAXXA

SEQ ID NO: 511 - protein, 40 aa, Artificial sequence
  protein pattern
  Variant (9)..(9): Xaa in position 9 is any amino acid
  Variant (11)..(14): Xaa in position 11 to 14 is any or no amino acid
  Variant (16)..(16): Xaa in position 16 is Ile or Leu
  Variant (20)..(20): Xaa in position 20 is Ser or Thr
  Variant (21)..(21): Xaa in position 21 is Phe or Tyr
  Variant (22)..(23): Xaa in position 22 to 23 is any amino acid
  Variant (24)..(24): Xaa in position 24 is Ala or Pro
  Variant (25)..(25): Xaa in position 25 is Asp or Glu
  Variant (26)..(26): Xaa in position 26 is any amino acid
  Variant (29)..(29): Xaa in position 29 is any amino acid
  Variant (31)..(31): Xaa in position 31 is Phe, His or Tyr
  Variant (33)..(33): Xaa in position 33 is Ala or Val
  Variant (35)..(37): Xaa in position 35 to 37 is any amino acid
  Variant (38)..(38): Xaa in position 38 is Phe, Ile or Leu
  Variant (39)..(39): Xaa in position 39 is His, Lys or Arg
  Variant (40)..(40): Xaa in position 40 is Gly or Gln
GKWVSEIRXPXXXXRXWLGXXXXXXXAAXAXDXAXXXXXX

SEQ ID NO: 512 - DNA, 1458 bp, Arabidopsis thaliana
  CDS (1)..(1458)
atgaagagtttcaacacagaaggacacaaccactccacggcggaatccggcgatgcctacaccgtgtcggacccgacaaagaacgtcgatgaagatggtcgagagaagcgtaccgggacgtggcttacggcgagtgcgcatattatcacggcggtgataggctccggagtgttgtctttagcatgggctatagctcagcttggttggatcgcagggacatcgatcttactcattttctcgttcattacttacttcacctccaccatgcttgccgattgctaccgtgcgccggatcccgtcaccggaaaacggaattacacttacatggacgttgttcgatcttacctcggtggtaggaaagtgcagctctgtggagtggcacaatatgggaatctgattggggtcactgttggttacaccatcactgcttctattagtttggtagcggtagggaaatcgaactgcttccacgataaagggcacactgcggattgtactatatcgaattatccgtatatggcggtttttggcattattcaggttattcttagccagatcccaaatttccacaagctctcttttctttccattatggccgcggtcatgtcctttacttatgcaactattggaatcggtctagccatcgcaaccgtcgcaggtgggaaagtgggtaagacgagtatgacgggcacagcggttggagtagatgtaaccgcagctcaaaagatatggagatcgtttcaagcggttggggacatagcgttcgcctatgcttatgccacggttctcatcgagattcaggatacactaagatctagcccagctgagaacaaagccatgaaaagagcaagtcttgtgggagtatcaaccaccacttttttctacatcttatgtggatgcatcggctatgctgcatttggaaacaatgcccctggagatttcctcacagatttcgggtttttcgagcccttttggctcattgactttgcaaacgcttgcatcgctgtccaccttattggtgcctatcaggtgttcgcgcagccgatattccagtttgttgagaaaaaatgcaacagaaactatccagacaacaagttcatcacttctgaatattcagtaaacgtacctttccttggaaaattcaacattagcctcttcagattggtgtggaggacagcttatgtggttataaccactgttgtagctatgatattccctttcttcaacgcgatcttaggtcttatcggagcagcttccttctggcctttaacggtttatttccctgtggagatgcacattgcacaaaccaagattaagaagtactctgctagatggattgcgctgaaaacgatgtgctatgtttgcttgatcgtctcgctcttagctgcagccggatccatcgcaggacttataagtagtgtcaaaacctacaagcccttccggactatgcatgagtga

SEQ ID NO: 513 - protein, 485 aa, Arabidopsis thaliana
MKSFNTEGHNHSTAESGDAYTVSDPTKNVDEDGREKRTGTWLTASAHIITAVIGSGVLSLAWAIAQLGWIAGTSILLIFSFITYFTSTMLADCYRAPDPVTGKRNYTYMDVVRSYLGGRKVQLCGVAQYGNLIGVTVGYTITASISLVAVGKSNCFHDKGHTADCTISNYPYMAVFGIIQVILSQIPNFHKLSFLSIMAAVMSFTYATIGIGLAIATVAGGKVGKTSMTGTAVGVDVTAAQKIWRSFQAVGDIAFAYAYATVLIEIQDTLRSSPAENKAMKRASLVGVSTTTFFYILCGCIGYAAFGNNAPGDFLTDFGFFEPFWLIDFANACIAVHLIGAYQVFAQPIFQFVEKKCNRNYPDNKFITSEYSVNVPFLGKFNISLFRLVWRTAYVVITTVVAMIFPFFNAILGLIGAASFWPLTVYFPVEMHIAQTKIKKYSARWIALKTMCYVCLIVSLLAAAGSIAGLISSVKTYKPFRTMHE

SEQ ID NO: 514 - DNA, 2007 bp, Glycine max
  CDS (364)..(1803)
  misc_feature (21)..(21): n is a, g, c or t
gtatttctctacttccatagngcttttgataaagtattatatatgccacttttttattaaaaaaaataataaattcctcacccatcgtttaagtacatgtgccacacttccacttaactactctcctttgacttcattccccttctctatttaacccattattgtttttctcgcaaactatcatgaattctaattgccttttcttttttctatagttcattatcttagttcaccaaactcttataagtagagccaagccaaaccaaccacaccaagtacaagcagagagttacaacacatatttctttttcttttccctttttcctaggcacagcacacgccctctcaaatagaaactgagagatgaattctgatcagtttcagaagaacagcatgttcgtagaaacccctgaagatggtggcaaaaacttcgacgatgatggacgagtcagaagaacgggtacatggataactgcgagtgcccatatcataacggcagtgatagggtcaggagtgttgtcacttgcatgggcaattgcacaaatgggttgggtggctggccctgccgttctctttgccttctctttcatcacttacttcacttccactcttcttgccgactgttatcgttcacctgatcctgttcatggcaagcgaaactacacctattccgatgttgtcagatccgtcttaggagggaggaaatttcagctgtgtggattagctcagtacataaatcttgtcggtgtaactatcggttacacgataacggcttcaattagtatggtggcggtgaagaggtcgaattgttttcacaaacatggtcatcatgttaagtgctatacgtcaaacaaccctttcatgatcctctttgcctgcattcaaatcgtgcttagccagataccaaatttccataagctctggtggctctccattgttgcagcagttatgtcttttgcttattcttccattggcctcgggctctcagtagctaaagtggcaggtggtggagagcctgtacggacaaccttaacgggggtgcaagttggggtagacgttacaggatccgagaaggtctggaggacgtttcaagctattggtgacattgccttcgcttatgcttattctaacgtgctcatcgagatacaggataccctgaaatcgagccctccagagaacaaggtcatgaaaagagcaagtttgattggcatcttgactacaaccttgttctatgtgctatgtggctgcctaggttatgcagcatttggaaacgatgcaccaggaaatttcctcacagggttcggcttctacgagcccttttggctcatagactttgctaacatctgcatagccgtgcacttggttggagcatatcaggtcttctgtcagcccatatttgggttcgtagagaactggggtaaggaaaggtggccaaatagccaatttgtaaatggagaacacgctttgaactttccactatgtggaaccttccctgtgaacttcttcagggtggtgtggagaacaacatatgtcatcatcactgctttgatagctatgatgtttccattcttcaatgacttcctaggcctgattggttcactgtccttttggccattaaccgtttacttccccatagaaatgtacattaagcagtcaaagatgcaaaggttttccttcacgtggacatggctcaagatactgagctgggcttgcttgatcgtttctattatctcagctgctggttccatccaaggcctcgctcaagatctcaagaaatatcagcccttcaaagcccagcaataataataatttgttccaaagttctaaattgctttcttttctaagtaactttttttagtaagtttcagcatgttcatggataatttattgttatcaagtgcttatgaaagaaagaatataacacccagctgcattgtataactgtcaagaataattctaagatgtatgaaagtgtgcactgtcatttaaaaaaaaaaaaaacccgcc

SEQ ID NO: 515 - protein, 479 aa, Glycine max
MNSDQFQKNSMFVETPEDGGKNFDDDGRVRRTGTWITASAHIITAVIGSGVLSLAWAIAQMGWVAGPAVLFAFSFITYFTSTLLADCYRSPDPVHGKRNYTYSDVVRSVLGGRKFQLCGLAQYINLVGVTIGYTITASISMVAVKRSNCFHKHGHHVKCYTSNNPFMILFACIQIVLSQIPNFHKLWWLSIVAAVMSFAYSSIGLGLSVAKVAGGGEPVRTTLTGVQVGVDVTGSEKVWRTFQAIGDIAFAYAYSNVLIEIQDTLKSSPPENKVMKRASLIGILTTTLFYVLCGCLGYAAFGNDAPGNFLTGFGFYEPFWLIDFANICIAVHLVGAYQVFCQPIFGFVENWGKERWPNSQFVNGEHALNFPLCGTFPVNFFRVVWRTTYVIITALIAMMFPFFNDFLGLIGSLSFWPLTVYFPIEMYIKQSKMQRFSFTWTWLKILSWACLIVSIISAAGSIQGLAQDLKKYQPFKAQQ

SEQ ID NO: 516 - DNA, 1865 bp, Glycine max
  CDS (222)..(1637)
cggacgcgtgggcggacgcgtgggcggagggttggacaaggacagtcggataagggggaagcgagcaatactctcgaatgtcacagataagcattctgctacacataaccaacactgccttctcgtttgagcattatataaactcagtcggtgctcataacttttcctcacacgactctgctcactcatatttatattgaacaaacagagatcccaaatcaatggatattgaagcaggtaaagatattcctgtaagagacccagcgctactcgatgacgacggcagaatcaaaagaaccgggaacgtgttcactgctaccacgcacatagtaacggtggtggtgggtgcaggagtgctggctctggcatgggccatggctcagcttggatggatagctggcatagccgttatgatcctctttgcatgcatttctgtttacacttacaatcttgtagctgattgctacagatttcctgacccagtcagtggcaagagaaactacacttacatgcaggccgttgatgcctaccttggtggaaaaatgcacgtgttctgcggatccgtcctatatgggaagctcgccggggttacagtgggctacactataactagttctgtgagcttggtggctataaagaaagctatttgctttcacaaaaaaggccatgatgcttattgcaagttttcaaacaatccctatatgattggttttgggatttgccaaattttattgtctcaaatcccaaatttccacaagttaacgtggctttcaaccattgctgctgctacctctttcggttatgcattcattggaagcgggctttctctttcggtggtggtctcaggtaaaggagaagcaaccagtatatttggaagcaaagtaggaccagatttatctgaagcggataaagtttggaaggttttcagtgctttgggaaacattgcacttgcttgctcatttgctactgttatttatgacataatggatacattgaagtcctatccaccagaaaacaaacagatgaaaaaggccaatatgttaggaatcacaacaatgacaatacttttcctgctatgcggtggccttggctatgctgctttcggagatgacacgccggggaacatcctcaccggctttggattttacgagccattctggttggtcgcccttggcaatgttttcattgtagtccacatggttggagcatatcaggtgatggctcaaccactatttcgtgtaattgagatgggtgctaacatggcgtggccgcgttcagatttcattaacaagagctatcccatcaaaatgggctccttaacatgtaacatcaacttgtttaggataatttggaggtcaatgtatgtggcagtggccacagttattgccatggctatgccatttttcaatgagtttcttgccttgcttggagcaatagggttttggcctctcattgtcttcttccctgtacaaatgcacattgcacagaaacgggtaaaaagactatcattgaagtggtgttgtcttcaaatattgagcttcgcgtgcttcctagttacagtttccgcggcagttggttcggttcgtggaattagcaagaatataaaaaaatacaaacttttccagtataaacaatagggcatttggttgcacattccagtgtctcacatttgagaaatgtgaaaatagctatagctaggcagaaaaagaagggagacaagttaattaaaacaaggcagtgaaaattatctgaatgcaaaattatttgtcagctacattattccaacttacagtgtgagcaacactatttcaactagtcaaaatatttctgtctcagttatatcaaattactctcattttatgttc

SEQ ID NO: 517 - protein, 471 aa, Glycine max
MDIEAGKDIPVRDPALLDDDGRIKRTGNVFTATTHIVTVVVGAGVLALAWAMAQLGWIAGIAVMILFACISVYTYNLVADCYRFPDPVSGKRNYTYMQAVDAYLGGKMHVFCGSVLYGKLAGVTVGYTITSSVSLVAIKKAICFHKKGHDAYCKFSNNPYMIGFGICQILLSQIPNFHKLTWLSTIAAATSFGYAFIGSGLSLSVVVSGKGEATSIFGSKVGPDLSEADKVWKVFSALGNIALACSFATVIYDIMDTLKSYPPENKQMKKANMLGITTMTILFLLCGGLGYAAFGDDTPGNILTGFGFYEPFWLVALGNVFIVVHMVGAYQVMAQPLFRVIEMGANMAWPRSDFINKSYPIKMGSLTCNINLFRIIWRSMYVAVATVIAMAMPFFNEFLALLGAIGFWPLIVFFPVQMHIAQKRVKRLSLKWCCLQILSFACFLVTVSAAVGSVRGISKNIKKYKLFQYKQ

SEQ ID NO: 518 - DNA, 1487 bp, Zea mays
  CDS (130)..(1425)
gtcgacctcctctatggtcctttggtgttttccagtatactaacttgtaccctcttcttcgtgccgggaggaaccaaaatcccccaaccgccccagcgcacggcccggccgtctcaggcgtccgcggagatgacgcagcaggacgtggagatggcggcgcgccacgggaccggcgccgacggagcgggattctaccctcagccgcggaacggcggcggcggcgagacgctcgacgacgacggcaagaagaagcgcacgggaacggtatggacggcaagcgcgcacatcatcacagccgtcatcggctccggcgtgctctccctagcctggtcgactgcacagctcggctgggtcgtggggccgctcaccctgatgatctttgccttgatcacatactacacctctagccttcttgctgactgctaccgcagcggcgatcagctcaccggcaagaggaactacacctacatggacgctgtcgccgcgtacctgggtcgatggcaagtcctgtcctgtggtgttttccagtatgttaacttggttggaactgccgttgggtatacaattacagcgtccatcagtgcagcggccgtgcacaaggcaaactgcttccacaacaagggccacgcggccgactgcagcacctacgacaccatgtacatggtcgtatttgggatcgttcagatcttcttctctcagctccctaacttcagcgacctttcgtggctgtccatcgtcgccgccatcatgtctttctcttactccagcatcgccgtcggcctctcgttggcgcggaccatttcaggccgtagtggtacgaccactctgaccggcactgagatcggagtcgacgttgattcagcccagaaggtctggctcgcgcttcaagctcttggcaacatcgcgttcgcttactcctactccatgattctcatcgaaatccaagacacggtgaagtctcctccagccgagaacaagacgatgaagaaggcgacgctgatgggcgtgacgaccaccacggcgttctacatgcttgctggctgcctcgggtactcggcgttcgggaacgcggcgccagggaacatcctgaccgggttcggcttctacgagccctactggctgatcgacttcgccaacgtctgcatcgtggtgcacctggtgggcgcgtaccaggtcttctcccagcccatcttcgcggccttggagacggcggccctcaagcgctggccgaacgaccggttcgtcacgcgcgagcaccccctcgtgggcgtcaggttccacgtgagcctgctcaggctgacgtggaggacggcgttcgtggtggtgagcacggtgctcgccatcgcgttgcccttcttcaacgatatcctgggcttcctcggagacatcgaattctggccgctcaccctggactacccagtgtagatggacatcccggagggccctgaacgcaaatatacctggagggggggggggggtgaggtggt

SEQ ID NO: 519 - protein, 431 aa, Zea mays
MTQQDVEMAARHGTGADGAGFYPQPRNGGGGETLDDDGKKKRTGTVWTASAHIITAVIGSGVLSLAWSTAQLGWVVGPLTLMIFALITYYTSSLLADCYRSGDQLTGKRNYTYMDAVAAYLGRWQVLSCGVFQYVNLVGTAVGYTITASISAAAVHKANCFHNKGHAADCSTYDTMYMVVFGIVQIFFSQLPNFSDLSWLSIVAAIMSFSYSSIAVGLSLARTISGRSGTTTLTGTEIGVDVDSAQKVWLALQALGNIAFAYSYSMILIEIQDTVKSPPAENKTMKKATLMGVTTTTAFYMLAGCLGYSAFGNAAPGNILTGFGFYEPYWLIDFANVCIVVHLVGAYQVFSQPIFAALETAALKRWPNDRFVTREHPLVGVRFHVSLLRLTWRTAFVVVSTVLAIALPFFNDILGFLGDIEFWPLTLDYPV

SEQ ID NO: 520 - DNA, 1988 bp, Zea mays subsp. mays
  CDS (195)..(1631)
aaactagtgtgtgaaatatctcctacaatatatatccggctctctctgtgtgcgtgctctaactgcagcggagcctcacagttgttcgtgtgctgtgtatttgtcactggtggtgctgtgcagaccaagctactgcgggagggagaagggtgtgtgccggcccgccgccaagcactgctacccggccggcggccatggaggtgagctccgtggagttcggtcatcacgcggcggccgcctcaaagtgctttgacgacgacggtcgcctcaagcgcacagggacgatgtggacggcgagcgcgcacattatcacggccgtgatagggtccggggtgctgtcgctcgcgtgggccatcgcgcagctcggctgggtggcaggccccaccgtcatgctgctcttctccttcgtcacctactacacatcggccctactcgccgactgctaccgctccggcgacgcctgcaccggcaagcgcaactacacgtacatggacgcggttaacgccaatctcagtggcgtcaaggtctggttctgcggcttcctgcagtacgccaacatcgtcggagtcgccataggctacaccattgccgcctctattagcatgctggcgatccagagggcgaactgcttccacgtggaggggcacggggacccctgcaacatctccagcacgccctacatgatcatcttcggcgtcgtgcagattttcttctcgcagatcccggacttcgaccagatatcgtggctctccatcctcgccgccgtcatgtccttcacctactccaccatcggcctgggcctgggcatcgcgcaggtggtgtccaacaagggcgtgcagggcagcctgacggggatcagcgtcggcgcggtcaccccggtcgacaagatgtggcgcagcctgcaggcgttcggcgacatcgccttcgcctactcctactccctcatcctcatcgagatccaggacaccatccgcgcgccgccgccgtccgagtccaaggtcatgcggcgcgccaccgtcgtcagcgtggccgtcaccacgttcttctacatgctgtgcgggtgcatggggtacgccgcgttcggggacaacgcccccgggaacctcctcacgggcttcggcttctacgagcccttctggctcctcgacgtcgccaacgccgccatcgccgtgcacctcgtcggcgcctaccaggtctactgccagcccctgttcgccttcgtcgagaagtgggcgcgccagaggtggcccaagtcccgctacatcacgggcgaggtcgacgtcccgctcccgctcgggaccgccggcggccggtgctacaagctcagcctgttccggctgacgtggcggacggcgttcgtggtggccacgacggtggtgtccatgctgctgcccttcttcaacgacgtggtcgggctcctgggcgcgctggggttctggccgctcaccgtctacttccccgtggagatgtacatcgtgcagaagaaggtgcccaggtggagcacgcggtgggtgtgcctgcagctgctcagcgtcgcctgcctcgtcatcaccgtcgcctccgccgcaggctccgttgccgggatcgtctctgacctcaaagtgtacaaaccgttcgtcaccacctcctgatggaccggcctagcttccgtgcagttcaaaacacacatacgcacgaacagatcattaattggcgcctagtatatatgtgcagtctttaattaaattaactaggcattaatcgatcgatcaccactacgcgtcgttctagtgatgcgcgtagcttgcatcaccgctcgctgatttaatttccattgtttttctttgatgatctggttagccgaaatggctagtgaattaagagaaaacaaatagtagcagtactgtgtgagtaatcccaagtcaaatacgttattgaagttgtcggcggtacaaaacgcttgtaaaatgtttgtgtttcaattaatcaagaagaattgtacgtgtttc

SEQ ID NO: 521 - protein, 478 aa, Zea mays subsp. mays
MEVSSVEFGHHAAAASKCFDDDGRLKRTGTMWTASAHIITAVIGSGVLSLAWAIAQLGWVAGPTVMLLFSFVTYYTSALLADCYRSGDACTGKRNYTYMDAVNANLSGVKVWFCGFLQYANIVGVAIGYTIAASISMLAIQRANCFHVEGHGDPCNISSTPYMIIFGVVQIFFSQIPDFDQISWLSILAAVMSFTYSTIGLGLGIAQVVSNKGVQGSLTGISVGAVTPVDKMWRSLQAFGDIAFAYSYSLILIEIQDTIRAPPPSESKVMRRATVVSVAVTTFFYMLCGCMGYAAFGDNAPGNLLTGFGFYEPFWLLDVANAAIAVHLVGAYQVYCQPLFAFVEKWARQRWPKSRYITGEVDVPLPLGTAGGRCYKLSLFRLTWRTAFVVATTVVSMLLPFFNDVVGLLGALGFWPLTVYFPVEMYIVQKKVPRWSTRWVCLQLLSVACLVITVASAAGSVAGIVSDLKVYKPFVTTS

SEQ ID NO: 522 - DNA, 1988 bp, Zea mays subsp. mays; identical to SEQ ID NO: 520
  CDS (285)..(1631)

SEQ ID NO: 523 - protein, 448 aa, Zea mays subsp. mays
MWTASAHIITAVIGSGVLSLAWAIAQLGWVAGPTVMLLFSFVTYYTSALLADCYRSGDACTGKRNYTYMDAVNANLSGVKVWFCGFLQYANIVGVAIGYTIAASISMLAIQRANCFHVEGHGDPCNISSTPYMIIFGVVQIFFSQIPDFDQISWLSILAAVMSFTYSTIGLGLGIAQVVSNKGVQGSLTGISVGAVTPVDKMWRSLQAFGDIAFAYSYSLILIEIQDTIRAPPPSESKVMRRATVVSVAVTTFFYMLCGCMGYAAFGDNAPGNLLTGFGFYEPFWLLDVANAAIAVHLVGAYQVYCQPLFAFVEKWARQRWPKSRYITGEVDVPLPLGTAGGRCYKLSLFRLTWRTAFVVATTVVSMLLPFFNDVVGLLGALGFWPLTVYFPVEMYIVQKKVPRWSTRWVCLQLLSVACLVITVASAAGSVAGIVSDLKVYKPFVTTS

SEQ ID NO: 524 - DNA, 1535 bp, Zea mays
  CDS (134)..(1522)
gaattcggctcgagttcactcactaacggccgtgcttgcactcgcagcgcatcacttgctactttggtagtggagagcagaaagaacagagctagattattcccaacaagctacagcaaattagttgctcttcatggccgtgtcacacaacgttgggagcaagcacggtgtcgcgccgctggaggtgtcggtggaggccgggaacggcggagccgccgagtggctggacgacgatggccggcctcgccgcacgggcacgttctggacggccagcgcgcacatcgtcaccgccgtcatcggctccggggtgctctcgctcgcctgggcgatcgcgcagctgggctgggtcgccggccccgccgccatgctcctcttcgccttcgtcacatactacaccgccacgctgctcgccgagtgctaccgcacgggcgacccggagacgggcaagcgcaactacacctacatggacgccgtgcgctccaacctcggcggcgccaaggtcgcgttctgcggcgtcatacagtacgccaacctcgtcggcgtcgccatcggctacaccatcgcggcgtccatcagcatgaaggccgtcaggagagctgggtgcttccacgcccacgggcacgctgatccctgcaacagctccagcaccccgtacatgatcctcttcggcgtcgtgcagatcctcttctcgcagatacccgacttcgaccagatttggtggctctccattgtcgccgccgtcatgtccttcacttactcttccatcgggctctccctcggcatcgcacagaccatctccaatggtgggttcatgggcagtctcactggcatcagcatcggcgccggtgtcacctccacgcagaagatctggcatacgcttcaggcattcggagacatcgccttcgcctactccttctccaacatcctcatcgagatccaagacacgatcaaggcaccgccaccgtcggagtccaaggtgatgcagaaggcgacgcgcctcagcgtggcgacgaccaccatcttctacatgctgtgcgggtgcatggggtacgcggcgttcggcgacaaggcgccggacaacctcctcaccggcttcggcttcttcgagccgttctggctcatcgacatcgccaacgtcgccatcgtcgtgcacctggtcggcgcgtaccaggtgttctgccagcccatcttcgccttcgtcgagcgccgcgccgccgcggcctggcccgacagcgccttcgtctcccaggagctccgcgtgggccccttcgcggtcagcgtgttccgcctgacatggcggtcgtccttcgtgtgcgtcaccaccgtcgttgccatgctgctgccgttcttcggcaacgtggtggggttcctcggcgccgtctccttctggccgctcaccgtctacttccccgtcgagatgtacatcaagcagcgccgcgtgccgcgcggcagcaccaagtggatctgtctccagacgctcagcgtcagctgcctcctcgtctccgtggcggccgccgactagtgagctcgtcgac

SEQ ID NO: 525 - protein, 462 aa, Zea mays
MAVSHNVGSKHGVAPLEVSVEAGNGGAAEWLDDDGRPRRTGTFWTASAHIVTAVIGSGVLSLAWAIAQLGWVAGPAAMLLFAFVTYYTATLLAECYRTGDPETGKRNYTYMDAVRSNLGGAKVAFCGVIQYANLVGVAIGYTIAASISMKAVRRAGCFHAHGHADPCNSSSTPYMILFGVVQILFSQIPDFDQIWWLSIVAAVMSFTYSSIGLSLGIAQTISNGGFMGSLTGISIGAGVTSTQKIWHTLQAFGDIAFAYSFSNILIEIQDTIKAPPPSESKVMQKATRLSVATTTIFYMLCGCMGYAAFGDKAPDNLLTGFGFFEPFWLIDIANVAIVVHLVGAYQVFCQPIFAFVERRAAAAWPDSAFVSQELRVGPFAVSVFRLTWRSSFVCVTTVVAMLLPFFGNVVGFLGAVSFWPLTVYFPVEMYIKQRRVPRGSTKWICLQTLSVSCLLVSVAAAD

SEQ ID NO: 526 - DNA, 1977 bp, Zea mays
  CDS (184)..(1620)
ccacgcgtccgctacaatatatatccggctctctctgtgtgcgtgctctaactgcagcggagcctcacagttgttcgtgtgctgtgtatttgtcactggtggtgctgtgcagaccaagctactgcgggagggagaagggtgtgtgccggcccgccgccaagcactgctacccggccggcggccatggaggtgagctccgtggagttcggtcatcacgcggcggccgcctcaaagtgctttgacgacgacggtcgcctcaagcgcacagggacgatgtggacggcgagcgcgcacattatcacggccgtgatagggtccggggtgctgtcgctcgcgtgggccatcgcgcagctcggctgggtggcaggccccaccgtcatgctgctcttctccttcgtcacctactacacatcggccctactcgccgactgctaccgctccggcgacgcctgcaccggcaagcgcaactacacgtacatggacgcggttaacgccaatctcagtggcgtcaaggtctggttctgcgggttcctgcagtacgccaacatcgtcggagtcgccataggctacaccattgccgcctctattagcatgctggcgatccagagggcgaactgcttccacgtggaggggcacggggacccctgcaacatctccagcacgccctacatgatcatcttcggcgtcgtgcagattttcttctcgcagatcccggacttcgaccagatatcgtggctctccatcctcgccgccgtcatgtcgttcacctactccaccatcggcctgggcctgggcatcgcgcaggtggtgtccaacaagggcgtgcagggcagcctgacggggatcagcgtcggcttggtcaccccggtcgacaagatgtggcgcagcctgcaggcgttcggcgacatcgccttcgcctactcctactcgctcatcctcatcgagatccaggacaccatccgcgcgccgccgccgtccgagtccaaggtcatgcggcgcgccaccgtcgtcagcgtggccgtcaccacgttcttctacatgctgtgcgggtgcatggggtacgccgcgttcggggacaacgcccccgggaacctcctcacgggcttcggcttctacgagcccttctggctcctcgacgtcgccaacgccgccatcgccgtgcacctcgtcggcgcctaccaggtctactgccagcccctgttcgccttcgtcgagaagtgggcgcgccagaggtggcccaagtcccgctacatcacgggcgaggtcgacgtcccgctcccgctcgggaccgccggcggccggtgctacaagctcagcctgttccggctgacgtggcggacggcgttcgtggtggccacgacggtggtgtccatgctgctgcccttcttcaacgacgtggtcgggctcctgggcgcgctggggttctggccgctcaccgtctacttccccgtggagatgtacatcgtgcagaagaaggtgcccaggtggagcacgcggtgggtgtgcctgcagctgctcagcgtcgcctgcctcgtcatcaccgtcgcctccgccgcaggctccgttgccgggatcgtctctgacctcaaagtgtacaaaccgttcgtcaccacctcctgatcgaccgtacgtcctagcttccgtgcagttcaaaacacatacgcacgaacagatcattaattggcgcctagtatatatgtgcagtctttaattaaattaactaggcattaatcgatcgattaccactacgtcgttctagtgatgcgcgtagcttgcatcatcgctcgctgatttaatttccattgtttttctttgatgatctggttagccgaaatggctagtgaattaagagaaaacaaatagtagcagtactgtgtgagtaatcccaagtcaaatacgttattgaagttgtcggcggtacaaaacgcttgtaaaatgtttgtgtttcaattaatcaagaagaattgtacgtgtttc

SEQ ID NO: 527 - protein, 478 aa, Zea mays
MEVSSVEFGHHAAAASKCFDDDGRLKRTGTMWTASAHIITAVIGSGVLSLAWAIAQLGWVAGPTVMLLFSFVTYYTSALLADCYRSGDACTGKRNYTYMDAVNANLSGVKVWFCGFLQYANIVGVAIGYTIAASISMLAIQRANCFHVEGHGDPCNISSTPYMIIFGVVQIFFSQIPDFDQISWLSILAAVMSFTYSTIGLGLGIAQVVSNKGVQGSLTGISVGLVTPVDKMWRSLQAFGDIAFAYSYSLILIEIQDTIRAPPPSESKVMRRATVVSVAVTTFFYMLCGCMGYAAFGDNAPGNLLTGFGFYEPFWLLDVANAAIAVHLVGAYQVYCQPLFAFVEKWARQRWPKSRYITGEVDVPLPLGTAGGRCYKLSLFRLTWRTAFVVATTVVSMLLPFFNDVVGLLGALGFWPLTVYFPVEMYIVQKKVPRWSTRWVCLQLLSVACLVITVASAAGSVAGIVSDLKVYKPFVTTS

SEQ ID NO: 528 - DNA, 1885 bp, Glycine max
  CDS (235)..(1647)
cttgtgatctctccgtagggacaataccatgcctcttggtcctttctctaatccaaatatctctccgttaatgctctcaccacaaacttcaatagactagccaaaagctaacaccaactataggccaaatcaccaataaatattatttcccgttcttttggcgtgttggccacccactgaacacatttgcactcacacatagaagcagagagaggccattggttggtttcagagatgggaagcatgcacatagaaaccccagaaacttttgctgatggtagcaaaaacttcgatgatgatggacgagctaaaagaactgggacttggattactgcaagtgctcatatcataacggctgtgattggttctggagtgctatctcttgcatgggcaattgcacagatgggttgggtagctggtcctgcagtgctctttgtcttctctttgataacatacttcacctccactcttctcgctgactgttaccgttcacctgaccctgtacatggcaagcgaaactacacatattctgaggttgtcaaagccaacctaggaggaagaaaatttcagctgtgtggattggctcagtatataaatcttgttggtgtaacaatcggctacactataactgcatcacttagtatgggggcggtgaagaagtcgaactgtttacacaaacatggccatcaagacgagtgcaaagttaaggacaacgcttttatgattgcttttgcctgcatccaaattcttctaagccaaataccaaacttccataagctctcttggctctctatcgtagcagctgttatgtcttttgcttattcttccattgggcttggcctttccatagccaaaatcataggtgggggacacgtgcgaacaaccttaacaggggtggaagtttcgggaacggaaaaggtttggaaaatgtttcaagctatcggtgacattgcctttgcttatgctttttctaatgtcctaattgagatccaggacacactgaaatcaagcccacctgagaacaaagtcatgaagagagcaagtttgattggcattatgactacaacattgttttatgtactatgtgggtgcttaggctatgctgcatttggaaatgatgcaccatctaatttcctcacaggattcggcttctatgagcccttttggctaatagactttgccaatgtctgcatagcagtgcacttagttggggcataccaggtctttgtccaacctatatttgggtttgtggaaaagtggagcaaagaaaattggacagaaagccaatttataaatggcgagcatactttgaacattcctctatgtggaagctacaatgtgaacttctttagggtagtgtggaggactgcatatgtgattatcactgccgttgtagctatgttactcccattcttcaatgactttttggcccttattggtgcactctctttctggccattgacggtttacttccctatagagatgtacattaagaagtcaaatatgcaaagattttccttcacctggacttggctcaagatattgagttgggtttgcttgatcatttctattatctcacttgtgggttccatccaaggcctttcggttagtatcaagaaatacaagcccttccaagcagaacaatagaactttcatacttagtattccaacttgagccaagagtttctattgagggcgacaaaatttgtattactatgttttgaaatagttgttatattttcaattctcgaaatcgagacaacttgttatactaaagtaatataataaaatgtttagtttgctatgttaaaaaattttaaacttggtagctgtttttttttcttttttgttaggttatgtttagattgatggaagaggatggaat

SEQ ID NO: 529 - protein, 470 aa, Glycine max
MGSMHIETPETFADGSKNFDDDGRAKRTGTWITASAHIITAVIGSGVLSLAWAIAQMGWVAGPAVLFVFSLITYFTSTLLADCYRSPDPVHGKRNYTYSEVVKANLGGRKFQLCGLAQYINLVGVTIGYTITASLSMGAVKKSNCLHKHGHQDECKVKDNAFMIAFACIQILLSQIPNFHKLSWLSIVAAVMSFAYSSIGLGLSIAKIIGGGHVRTTLTGVEVSGTEKVWKMFQAIGDIAFAYAFSNVLIEIQDTLKSSPPENKVMKRASLIGIMTTTLFYVLCGCLGYAAFGNDAPSNFLTGFGFYEPFWLIDFANVCIAVHLVGAYQVFVQPIFGFVEKWSKENWTESQFINGEHTLNIPLCGSYNVNFFRVVWRTAYVIITAVVAMLLPFFNDFLALIGALSFWPLTVYFPIEMYIKKSNMQRFSFTWTWLKILSWVCLIISIISLVGSIQGLSVSIKKYKPFQAEQ

SEQ ID NO: 530 - DNA, 1825 bp, Glycine max
  CDS (130)..(1593)
ccacgcgtccgtacggctgcgagaagacgacagaagggggaggcacaacagctactccagctcttttgcattgcttgtagcagaagctgctgctgcagcttattaaagaaagaaagcctccaagacaagatggttgagaaggatggcgttggcagcaagtatcttcaacaaacacttaacgtctccatcgacatgcatcaacacggaatctctaagtgtttcgacgacgatggtcgcccgaaaagaaccgggacggtgtggacttcaagtgcacacataataactgcagtgattgggtctggggtgctatctctggcttgggctatagctcagcttggatggattgctggtcctattgtcatggttatcttttctgccatcacttactacacttccactcttctcgctgattgttaccgcaccggtgatcctgtaactggcaagagaaactacacttacatggacgctattcagtctaactttggtggaaatggctttaaggtcaagctgtgcgggctagttcagtatgttaaccttttcggagtggccattggttacactatagcggcttccactagcatgatggcaattgaaagatctaattgtttccacaagagtggagggaaagatccgtgccacattaacagcaacatgtacatgatttcatttggtatagtggaaattcttttctcacaaattccgggcttcgatcaactgtggtggctctccattgtagctgctgtcatgtccttcacatactccactattgggctaggccttggtattgggaaagttattgaaaatggaggagttggaggaagcctaaccgggataacaattggtaccgtgacccaaactgataaagtttggagaaccatgcaagctcttggtgacatagcctttgcttattcatactccctcatccttatagaaattcaggacacagtgaaatcccctccatcagagtcaaaaacaatgaagaaggctagtttcatcagtgttgcagtaactagcattttctacatgctttgtggttgctttggttatgctgcttttggagatgcaagccctggaaaccttctcactggttttggcttctacaacccatactggctccttgacatagctaatgctgccatagtgatccaccttgttggttcataccaagtttactgccagcccctcttcgccttcgtcgagaaacacgcggcgcaaatgttcccagatagtgattttctgaacaaagaaattgaaattccaatccctggtttccatccctacaggctcaacctcttcaggttggtttggaggacaatatatgtaatgttgagcactgtaatatcaatgctcctcccattcttcaatgacataggtggacttcttggagcatttggattttggccccttacagtgtatttcccagtggagatgtacattattcaaaagagaataccaaagtggagcacaaagtggatctgcctccaaatacttagcatgacttgccttttgatgactataggagctgcagctggctctattgctgggattgccattgatcttcgaacttacaagccattcaagaccaactattgattaaactatgattgccattgatagagatttcagaaaccaaatttcatttcttggtcatattcttatgaagccaaggatatatggtgatcttgtttgtttatggcctagcagtcctgtgtgttccacttctttctactgtgtatctgttactctctagctcgttctgcaacctaattcaaaatggaagaaatgaagtaaaaacaaaaaaaaaaaaaaaaaaaaaaaaaaaaaa

SEQ ID NO: 531 - protein, 487 aa, Glycine max
MVEKDGVGSKYLQQTLNVSIDMHQHGISKCFDDDGRPKRTGTVWTSSAHIITAVIGSGVLSLAWAIAQLGWIAGPIVMVIFSAITYYTSTLLADCYRTGDPVTGKRNYTYMDAIQSNFGGNGFKVKLCGLVQYVNLFGVAIGYTIAASTSMMAIERSNCFHKSGGKDPCHINSNMYMISFGIVEILFSQIPGFDQLWWLSIVAAVMSFTYSTIGLGLGIGKVIENGGVGGSLTGITIGTVTQTDKVWRTMQALGDIAFAYSYSLILIEIQDTVKSPPSESKTMKKASFISVAVTSIFYMLCGCFGYAAFGDASPGNLLTGFGFYNPYWLLDIANAAIVIHLVGSYQVYCQPLFAFVEKHAAQMFPDSDFLNKEIEIPIPGFHPYRLNLFRLVWRTIYVMLSTVISMLLPFFNDIGGLLGAFGFWPLTVYFPVEMYIIQKRIPKWSTKWICLQILSMTCLLMTIGAAAGSIAGIAIDLRTYKPFKTNY

SEQ ID NO: 532 - DNA, 1743 bp, Glycine max
  CDS (54)..(1595)
gaattcggctcgagcagctttcttcttagtatcgagcttcatatttcacagccatgttgccaagaagtagaacccttcctagcagaatccaccaaggaattatagaagagaggcacgatgtcaggccctacgtacaagtagaagtgcgacccaataatatccaaacggagacccaagcgatgaatatccagtctaactattccaagtgcttcgatgatgatggtcgcttgaagagaacaggaacattttggacggcaactgctcatatcatcactgctgtgatagggtcgggagtcctttcactagcatgggcggttgctcagcttggttgggttgctggacctgttgtcatgtttctctttgccgtcgtcaatctctacacttccaacctattaacacagtgttacaggaccggtgactccgttaatggacacagaaattacacctacatggaggctgtcaagtccatcttgggaggaaaaaaggtcaagttatgtggcctcatccaatatatcaatctgtttggagttgcaatcgggtacaccattgctgcctctgtcagtatgatggccataaaaaggtcgaattgctatcacagcagtcatggaaaagatccctgccacatgtcaagcaatgggtatatgataacatttggaatagcagaagtgatattttcccaaatcccagactttgatcaggtgtggtggctatccatagttgcagctatcatgtccttcacttattcttcagttggattgagtcttggagtggccaaagtagcagaaaataaaactttcaaaggaagcctgatgggaattagcattggcacagtaacacaagccggaacagtcaccagcacacagaaaatatggaggagtttacaagctcttggggcaatggcctttgcatactccttttccattatcctcatcgaaattcaggacaccataaaatttcctcctgcagagcacaagaccatgagaaaggccacaacattgagcatcgcggttaccacagtgttctatttactctgtggatgcatgggttatgcagccttcggagataatgcacctggaaatctcttgactggttttgggttctataacccttattggcttctggacattgccaaccttgcaattgttatccacctagttggggcatatcaggttttttcccagcccttatttgcatttgtggaaaaatggagtgtacgcaaatggccaaagagcaattttgtcacggcagaatatgatataccgattccctgctttggtgtgtaccaactcaacttcttccgcttagtatggagaaccatttttgtgctgttgacgaccctcatagccatgctcatgccttttttcaacgatgtggttggaatacttggcgcttttgggttctggcccttaacagtttatttccctatcgacatgtatatttcgcaaaagaagattggacgatggactagtcggtggattggacttcaattacttagtgtcagttgcctcatcatttcattgttagctgcagttggttccatggcaggggttgttttggacctcaagacttataagccatttaaaactagttattaagtgagatttaaagaaggtcgtagaaatagaagtgtttaagcttgatgatattatagaaaactaatgataagttggtttgtgaaatttaagtatatacgctccatgccgctgctgttagagcaattgatttgagaaaaaaaaaaaaaaa

SEQ ID NO: 533 - protein, 513 aa, Glycine max
MLPRSRTLPSRIHQGIIEERHDVRPYVQVEVRPNNIQTETQAMNIQSNYSKCFDDDGRLKRTGTFWTATAHIITAVIGSGVLSLAWAVAQLGWVAGPVVMFLFAVVNLYTSNLLTQCYRTGDSVNGHRNYTYMEAVKSILGGKKVKLCGLIQYINLFGVAIGYTIAASVSMMAIKRSNCYHSSHGKDPCHMSSNGYMITFGIAEVIFSQIPDFDQVWWLSIVAAIMSFTYSSVGLSLGVAKVAENKTFKGSLMGISIGTVTQAGTVTSTQKIWRSLQALGAMAFAYSFSIILIEIQDTIKFPPAEHKTMRKATTLSIAVTTVFYLLCGCMGYAAFGDNAPGNLLTGFGFYNPYWLLDIANLAIVIHLVGAYQVFSQPLFAFVEKWSVRKWPKSNFVTAEYDIPIPCFGVYQLNFFRLVWRTIFVLLTTLIAMLMPFFNDVVGILGAFGFWPLTVYFPIDMYISQKKIGRWTSRWIGLQLLSVSCLIISLLAAVGSMAGVVLDLKTYKPFKTSY

SEQ ID NO: 534 - DNA, 1862 bp, Glycine max
  CDS (37)..(1578)
ccacgcgtccggtatcgagctacatatttcacagccatgttgccaagaagtagaacccttcctagcagaatccaccaaggaattatagaagagaggcacgatgtcaggccctacgtacaagtagaagtgcgacccaataatatccaaacggagacccaagcgatgaatatccagtctaactattccaagtgcttcgatgatgatggtcgcttgaagagaacaggaacattttggacggcaactgctcatatcatcactgctgtgatagggtcgggagtcctttcactagcatgggcggttgctcagcttggttgggttgctggacctgttgtcatgtttctctttgccgtcgtcaatctctacacttccaacctattaacacagtgttacaggaccggtgactccgttaatggacacagaaattacacctacatggaggctgtcaagtccatcttgggaggaaaaaaggtcaagttatgtggcctcatccaatatatcaatctgtttggagttgcaatcgggtacaccattgctgcctctgtcagtatgatggccataaaaaggtcgaattgctatcacagcagtcatggaaaagatccctgccacatgtcaagcaatgggtatatgataacatttggaatagcagaagtgatattttcccaaatcccagactttgatcaggtgtggtggctatccatagttgcagctatcatgtccttcacttattcttcagttggattgagtcttggagtggccaaagtagcagaaaataaaactttcaaaggaagcctgatgggaattagcattggcacagtaacacaagccggaacagtcaccagcacacagaaaatatggaggagtttacaagctcttggggcaatggcctttgcatactccttttccattatcctcatcgaaattcaggacaccataaaatctcctcctgcagagcacaagaccatgagaaaggccacaacattgagcatcgcggttaccacagtgttctatttactctgtggatgcatgggttatgcagccttcggagataatgcacctggaaatctcttgactggttttgggttctataacccttattggcttctggacattgccaaccttgcaattgttatccacctagttggggcatatcaggttttttcccagcccttatttgcatttgtggaaaaatggagtgtacgcaaatggccaaagagcaattttgtcacggcagaatatgatataccgattccctgctttggtgtgtaccaactcaacttcttccgcttagtatggagaaccatttttgtgctgttgacgaccctcatagccatgctcatgccttttttcaacgatgtggttggaatacttggcgcttttgggttctggcccttaacagtttatttccctatcgacatgtatatttcgcaaaagaagattggacgatggactagtcggtggattggacttcaattacttagtgtcagttgcctcatcatttcattgttagctgcagttggttccatggcaggggttgttttggacctcaagacttataagccatttaaaactagttattaagtgagatttaaagaaggtcgtagaaatagaagtgtttaagcttgatgatattatagaaaactaatgataagttggtttgtgaaatttaagtatatacgctccatgccgctgctgttagagcaattgatttgagaagaagaaaaaaatgataattggacataacatacctcagaatttggacgtatacgtgtctgtgtaactgctatattgaagtcaattgtaaggaataaaagtctttgaacgtgttatttctttaaaaaaaaaaaaaaaaaaaaaaaaaaaaa

SEQ ID NO: 535 - protein, 513 aa, Glycine max
MLPRSRTLPSRIHQGIIEERHDVRPYVQVEVRPNNIQTETQAMNIQSNYSKCFDDDGRLKRTGTFWTATAHIITAVIGSGVLSLAWAVAQLGWVAGPVVMFLFAVVNLYTSNLLTQCYRTGDSVNGHRNYTYMEAVKSILGGKKVKLCGLIQYINLFGVAIGYTIAASVSMMAIKRSNCYHSSHGKDPCHMSSNGYMITFGIAEVIFSQIPDFDQVWWLSIVAAIMSFTYSSVGLSLGVAKVAENKTFKGSLMGISIGTVTQAGTVTSTQKIWRSLQALGAMAFAYSFSIILIEIQDTIKSPPAEHKTMRKATTLSIAVTTVFYLLCGCMGYAAFGDNAPGNLLTGFGFYNPYWLLDIANLAIVIHLVGAYQVFSQPLFAFVEKWSVRKWPKSNFVTAEYDIPIPCFGVYQLNFFRLVWRTIFVLLTTLIAMLMPFFNDVVGILGAFGFWPLTVYFPIDMYISQKKIGRWTSRWIGLQLLSVSCLIISLLAAVGSMAGVVLDLKTYKPFKTSY

SEQ ID NO: 536 - DNA, 1873 bp, Glycine max
  CDS (171)..(1610)
atataaaaatagagggatctccttctcttatccagagaagcatatatagagaaagaaagaaggccctgccctatatagctgaaggcagtgtgcacaaactctgagactgcatattagagtttgagtcttcactctgaagcctaacttgggtttgtgtctctcatagcaagatgatggaaaacggtggcaaacagacatttgaagtctccaatgacacgcttcaacgagtaggttccaagagctttgatgatgatggccgtctcaaaagaactggaactatttggactgcaagtgcccacataataacagctgttattggttctggggtgctatctttggcttgggctattgctcagctaggttggattgctggtcctgtggtgatgattctattctctattgtgacttattatacctcaactcttctagctacttgttaccgttctggtgaccaactcagtggcaagagaaactacacttacacacaagctgttagatcctaccttggcggtttttcggtcaagttttgtgggtgggttcagtatgcgaacctttttggagtggcaattgggtacaccatagcagcttccataagcatgatggcaatcaaaaggtctaattgttatcatagtagcggggggaaaaatccatgcaaaatgaacagcaattggtacatgatttcatatggtgtttcggaaattatcttctcccaaattccagatttccatgagttgtggtggctctctattgtagctgctgtcatgtccttcacatactcattcattggacttggccttggtattggtaaagttataggaaacggaagaattaaaggaagcctaactggtgtaactattgggactgtgacagaatcccaaaaaatttggagaactttccaagcgcttggaaacatagcctttgcttactcctactcaatgatccttattgaaattcaggacacaatcaaatcccctccagcagagtcagagacaatgtccaaggctactttaataagtgttttggtcacaaccgttttctatatgctatgtggttgctttggctatgcttcttttggagatgcaagtccgggaaaccttctcactggctttggcttctataacccattttggctcattgacatagccaatgctggcattgttatccaccttgttggtgcataccaagtttactgccaacccctcttctcattcgtcgaatcaaatgcggcagaaaggttccctaatagtgattttatgagcagagagtttgaagtaccaatccctggttgcaaaccctacaagctcaacctcttcaggttggtttggaggacactttttgtgattttgtcaactgtgatagccatgctcctaccattcttcaatgacattgtagggcttattggagccattggattttggcccctcactgtgtatttaccagtggagatgtatataactcaaactaagataccaaagtggggcataaaatggataggcctacaaatgcttagtgttgcatgctttgtaattactatattagctgcagcaggttccattgctggggttattgatgatcttaaagtttacaagccatttgttaccagctactaattcaataggataattacttagtgatcatgatcaccattgtcagagatttcattagcaacaagaaaaaaaaaagaaggtaaattgttgcaaattgaaatcaacaggaaggtggtcttacttgtttattgcttagtaaccttgtatcttctgtatctttgtttttttttgtttgtgtgtgtgtgttctcttactttgtaacttgctctgtatccctaatttgcaatgagaaatggaggaaatgaagcagaggctttcaaattatc

SEQ ID NO: 537 - protein, 479 aa, Glycine max
MMENGGKQTFEVSNDTLQRVGSKSFDDDGRLKRTGTIWTASAHIITAVIGSGVLSLAWAIAQLGWIAGPVVMILFSIVTYYTSTLLATCYRSGDQLSGKRNYTYTQAVRSYLGGFSVKFCGWVQYANLFGVAIGYTIAASISMMAIKRSNCYHSSGGKNPCKMNSNWYMISYGVSEIIFSQIPDFHELWWLSIVAAVMSFTYSFIGLGLGIGKVIGNGRIKGSLTGVTIGTVTESQKIWRTFQALGNIAFAYSYSMILIEIQDTIKSPPAESETMSKATLISVLVTTVFYMLCGCFGYASFGDASPGNLLTGFGFYNPFWLIDIANAGIVIHLVGAYQVYCQPLFSFVESNAAERFPNSDFMSREFEVPIPGCKPYKLNLFRLVWRTLFVILSTVIAMLLPFFNDIVGLIGAIGFWPLTVYLPVEMYITQTKIPKWGIKWIGLQMLSVACFVITILAAAGSIAGVIDDLKVYKPFVTSY

SEQ ID NO: 538 - DNA, 1821 bp, Zea mays
  CDS (187)..(1602)
cggacgcgtgggcggacgcgtgggcggacgcgtgggcgcaccccgcgctcggcggactcttttgctgctgcacctgccatcgtcacgcaccggtgtgtggagcgaagccagcgagcgagaagtagccacagagcggcctcagagagacgtgcagatcgagagagagacgaacagagagagcgattcatggtaggtgcgatgcgcggcggagccatggagttggaggaccgcctggccacccttcctcgcttccgcggcgatcacgatgacgacggcaaggaaaggaggacagggacggtatggacggcaacggcgcacatcatcacggcggtgatcggctccggcgtgctgtcgctggcgtgggcgatggcgcagctggggtgggtggccgggccgttgaccctggtgctcttcgcggcgatcaccttctacacctgcggcctcctcgcagactgctaccgcgttggcgaccccgtgacgggcaagcgcaactacacctacaccgaggccgtcaagagcaacctgggcggctggtacgtctggttctgcggcttctgccagtacgtcaacatgttcggcacaggcatcggctacaccatcacagcctccatcagtgcagcggccatcaacaagtccaactgcttccactggcacggccacgatgccgactgcagccagaacaccagcgcctacatcatcggcttcggcgtggtgcaggtcatcttcagccagctccacaacttccacaagctgtggtggctttccatcatcgccgccatcatgtccttctcctactccgccatcgccgtgggcctctccctggcgcagatcgtcatgggccccacggggaagaccaccatgaccggcaccctggtcggggtggacgtggacgctgcgcagaaggtgtggatgacgttccaggcgctgggcaacgtggccttcgcgtactcgtacgccatcatcctcatcgagatccaggacacgctgcgctccccgcccgccgagaacaagaccatgcgccgcgccaccatgatgggcatctccaccaccaccggcttctacatgttgtgcggctgcctcggctacgccgcgttcggcaacgccgcgtcggggaacatcctcaccggcttcggcttctacgagcccttctggctcgtcgacttcgccaacgcctgcatcgtcgtgcacctcgtcggcggcttccaggtcttctgccagccgctgttcgcggccgtcgagggcgccgtggcggcgcggtaccccgggtcgacgcgcgagtacggcgccgcgggcctcaacgtcttccgcctcgtgtggcgcacggcgttcgtggctgtcatcacgctgctggccatcctcatgcccttcttcaacagcatcctgggcatcctcggcagcatcgccttctggccgctcaccgtcttcttccccgtcgagatgtacatccggcagcggcaggtgcgaaggttcagcaccaagtggatagcgctgcagagcctcagcttcgtctgtttcctcgtcaccgccgcctcctgcgcggcctccgtgcagggcgtggtcgactcgctcaagacctacgtgccgttcaagacgaggtcgtgagctcctgctgcttagttattatacatgtagcatacatactactcgtgcctcctttgtagtggcaccgaaacaaactgagcaaactcagccaaattagttatgcgggagtttaattttgaactactagtatgttgctgtcgaatgcaacaaaactaataacgtttacagtttttctatttggcaaaaaaaaaaaaaaaaaaaaaaaaaaaaaaaaaaaaa

SEQ ID NO: 539 - protein, 471 aa, Zea mays
MVGAMRGGAMELEDRLATLPRFRGDHDDDGKERRTGTVWTATAHIITAVIGSGVLSLAWAMAQLGWVAGPLTLVLFAAITFYTCGLLADCYRVGDPVTGKRNYTYTEAVKSNLGGWYVWFCGFCQYVNMFGTGIGYTITASISAAAINKSNCFHWHGHDADCSQNTSAYIIGFGVVQVIFSQLHNFHKLWWLSIIAAIMSFSYSAIAVGLSLAQIVMGPTGKTTMTGTLVGVDVDAAQKVWMTFQALGNVAFAYSYAIILIEIQDTLRSPPAENKTMRRATMMGISTTTGFYMLCGCLGYAAFGNAASGNILTGFGFYEPFWLVDFANACIVVHLVGGFQVFCQPLFAAVEGAVAARYPGSTREYGAAGLNVFRLVWRTAFVAVITLLAILMPFFNSILGILGSIAFWPLTVFFPVEMYIRQRQVRRFSTKWIALQSLSFVCFLVTAASCAASVQGVVDSLKTYVPFKTRS

SEQ ID NO: 540 - DNA, 1428 bp, Arabidopsis thaliana
  CDS (1)..(1428)
atggacgcatacaacaatccctcggcggtggagtcgggtgacgccgccgtgaaaagcgtcgacgacgatggtcgagagaagagaacgggaacattttggacggcgagtgcgcacataatcacggcggtcataggctcaggggtgctgtcgttggcttgggctatagcacagcttggttgggtggcaggaaccacagttttggtcgctttcgccatcattacttactacacgtccaccttgctcgccgactgttaccgttcgccggactccatcaccggaacacgcaactataattacatgggcgtcgtccgatcttaccttggtggtaaaaaggttcagctatgtggagtggcacagtacgtgaatctcgtaggggtcactattggttacaccatcactgcctccataagcttagtagcgattgggaaatcaaattgttatcatgacaagggacataaagcgaaatgttctgtatcgaattatccatacatggcggcatttgggatcgtccagatcattctgagccagcttcctaacttccacaagctctctttcctatccatcatcgccgcggttatgtccttctcttatgcgtctatcggaataggcctagccatcgctactgtagcaagtgggaagattggtaagacagaattgacagggacagtgataggtgtggacgtaactgcgtctgaaaaagtttggaaattgtttcaagcgattggagacattgccttttcatacgcttttaccactattctcatcgagattcaggacacattgagatcaagcccaccagagaacaaagtgatgaaacgagcaagtcttgtcggagtctcaaccacaactgttttctacatcttgtgtggttgcatcggatatgctgcgttcggcaaccaagcccctggtgacttccttaccgattttggtttttacgaaccttattggctcatcgactttgccaatgcttgcattgctctccatctaataggtgcctatcaggtgtatgcgcagccgtttttccagtttgttgaggaaaactgcaacaaaaaatggcctcaaagcaatttcatcaacaaagaatactcgtcaaaggttcctttgcttggaaaatgtcgtgtcaacctcttcagactggtttggaggacatgctatgttgttttgacaacatttgtagcaatgatattccccttcttcaatgcgatcttgggtttgctaggggcattcgcgttctggccactcacagtttattttccggtggcaatgcacattgcgcaggctaaagtcaagaagtattctcgtagatggttggccttgaacctcctcgtattggtttgcttgatcgtctcggcccttgccgccgtaggatccatcattggcttaattaatagtgtcaagtcatacaagcccttcaagaatttagactag

SEQ ID NO: 541 - protein, 475 aa, Arabidopsis thaliana
MDAYNNPSAVESGDAAVKSVDDDGREKRTGTFWTASAHIITAVIGSGVLSLAWAIAQLGWVAGTTVLVAFAIITYYTSTLLADCYRSPDSITGTRNYNYMGVVRSYLGGKKVQLCGVAQYVNLVGVTIGYTITASISLVAIGKSNCYHDKGHKAKCSVSNYPYMAAFGIVQIILSQLPNFHKLSFLSIIAAVMSFSYASIGIGLAIATVASGKIGKTELTGTVIGVDVTASEKVWKLFQAIGDIAFSYAFTTILIEIQDTLRSSPPENKVMKRASLVGVSTTTVFYILCGCIGYAAFGNQAPGDFLTDFGFYEPYWLIDFANACIALHLIGAYQVYAQPFFQFVEENCNKKWPQSNFINKEYSSKVPLLGKCRVNLFRLVWRTCYVVLTTFVAMIFPFFNAILGLLGAFAFWPLTVYFPVAMHIAQAKVKKYSRRWLALNLLVLVCLIVSALAAVGSIIGLINSVKSYKPFKNLD

SEQ ID NO: 542 - DNA, 1443 bp, Arabidopsis thaliana
  CDS (1)..(1443)
atggtcgttcagaatgttcaagatttggatgttcttccgaaacatagctcggattcattcgatgatgatggtcgtcccaagcgaaccgggacggtgtggacagcaagtgcacacataataacagcagtaattgggtcaggagtgttgtcattggcatgggccgttgctcagattggttggattggtggtccagtggctatgttactcttttctttcgttactttttacacatctacccttctctgttcttgttaccgatctggtgactctgttaccggcaaaagaaactacacttacatggacgctattcactccaacctcggtgggattaaggtgaaagtatgtggagttgtgcaatatgttaatctatttggtacagcaattggatatacaattgcatcagctataagtttggtagcaatccaaaggacaagttgccaacagatgaatggaccaaatgatccttgtcatgttaatggaaatgtttacatgattgcgtttggtattgtacaaatcatattctctcagattcctgattttgatcagttatggtggctttccattgtcgctgcggtcatgtcttttgcttattctgccattggacttggccttggtgtctctaaagtggtagagaacaaagaaattaaaggtagtctcactggagtcactgttgggacagtgacactgagtgggacagtgacatcgtcgcagaaaatatggagaacatttcagtctcttggcaacattgcgtttgcgtactcttactcgatgattctcatcgaaattcaggacacggtgaaatcaccgcctgccgaagtaaacacgatgagaaaagcgacttttgtaagtgtggcagtgactacagtcttctacatgctatgtggctgtgtagggtatgcagcatttggggataacgcacccggaaatctcctcgctcatggagggtttagaaacccatattggttgcttgacattgctaatctcgctatagtgatccatctagtcggtgcttaccaagtctattgccaacccctctttgccttcgtcgagaaggaagcctctaggaggtttccagagagcgaattcgtcacaaaagagatcaagatccaactcttcccggggaagccctttaacttgaatctcttcaggctcgtatggaggacgttcttcgtgatgacaacaacgttgatctcaatgttaatgcctttctttaacgatgtagtcggtctcttgggggccattggtttttggcctttaacggtttatttcccagtggaaatgtacattgcacagaagaatgttccgagatggggcacaaagtgggtttgtctacaagtcttgagtgtgacatgtctttttgtgtccgtagccgcggccgcgggatctgttattggcattgttagtgatctcaaggtctacaaacctttccagtctgaattctga

SEQ ID NO: 543 - protein, 480 aa, Arabidopsis thaliana
MVVQNVQDLDVLPKHSSDSFDDDGRPKRTGTVWTASAHIITAVIGSGVLSLAWAVAQIGWIGGPVAMLLFSFVTFYTSTLLCSCYRSGDSVTGKRNYTYMDAIHSNLGGIKVKVCGVVQYVNLFGTAIGYTIASAISLVAIQRTSCQQMNGPNDPCHVNGNVYMIAFGIVQIIFSQIPDFDQLWWLSIVAAVMSFAYSAIGLGLGVSKVVENKEIKGSLTGVTVGTVTLSGTVTSSQKIWRTFQSLGNIAFAYSYSMILIEIQDTVKSPPAEVNTMRKATFVSVAVTTVFYMLCGCVGYAAFGDNAPGNLLAHGGFRNPYWLLDIANLAIVIHLVGAYQVYCQPLFAFVEKEASRRFPESEFVTKEIKIQLFPGKPFNLNLFRLVWRTFFVMTTTLISMLMPFFNDVVGLLGAIGFWPLTVYFPVEMYIAQKNVPRWGTKWVCLQVLSVTCLFVSVAAAAGSVIGIVSDLKVYKPFQSEF

SEQ ID NO: 544 - DNA, 1431 bp, Arabidopsis thaliana
  CDS (1)..(1431)
atggttcaaaaccaccaaacagttctcgccgtcgatatgccacaaaccggcggctccaagtacttggacgacgacgggaaaaacaaaagaactgggagtgtttggacggcgagtgcacacataataacggcagtgataggttcgggagttttgtcactagcgtgggctacggcgcagctaggttggctcgccggaccggtggtgatgttgctcttctctgccgtcacttatttcacttcttctcttcttgctgcttgttaccgctccggcgaccctatctccggcaagaggaactacacttatatggatgctgtccgatcaaatctcggtggcgtgaaggtgacgctatgtgggattgttcagtatcttaatatctttggtgttgctattggctacacaattgcttcagctataagcatgatggcaataaagagatcaaactgtttccacaagagtggagggaaagatccatgtcacatgaacagtaatccttacatgatagcttttggattagtccagattctattctctcagattccagattttgatcaactttggtggctctcaatcctcgccgccgttatgtccttcacttattcctcagccggtctcgccctcggcatagcccaagttgtcgttaatgggaaggtgaagggaagtctcactgggattagcataggagcagtaacagagacacagaagatatggaggacctttcaagctcttggagacattgcttttgcttactcttactccattatcctcatcgagattcaggacacagtgaagtcaccaccatcagaagagaagacgatgaagaaggcaacacttgtgagcgtcagtgtaacgactatgttctatatgttgtgtggatgtatgggatatgcagcctttggagacttgtctccgggaaatctcttaaccggtttcgggttttataatccttattggcttcttgacattgcaaatgcagccattgtgattcaccttattggtgcataccaagtctattgccaacctctgtttgctttcatcgagaagcaagcttccattcaattccctgatagtgagttcattgcaaaagatatcaaaattccaattcctggtttcaagcctctccgcttgaatgtcttcaggttgatatggaggacagtgtttgtgatcataacgacagttatctcaatgcttcttccgtttttcaacgacgttgtgggtctgctcggggcactagggttttggccattgacggtgtattttccagtggaaatgtacatcgcgcagaagaagatacctagatggagcaccagatgggtttgccttcaagtcttcagcttagggtgtctagtagttagcattgctgcagctgcagggtccatagctggagtacttcttgatctaaagtcctacaagccatttcgaagcgaatactga

SEQ ID NO: 545 - protein, 476 aa, Arabidopsis thaliana
MVQNHQTVLAVDMPQTGGSKYLDDDGKNKRTGSVWTASAHIITAVIGSGVLSLAWATAQLGWLAGPVVMLLFSAVTYFTSSLLAACYRSGDPISGKRNYTYMDAVRSNLGGVKVTLCGIVQYLNIFGVAIGYTIASAISMMAIKRSNCFHKSGGKDPCHMNSNPYMIAFGLVQILFSQIPDFDQLWWLSILAAVMSFTYSSAGLALGIAQVVVNGKVKGSLTGISIGAVTETQKIWRTFQALGDIAFAYSYSIILIEIQDTVKSPPSEEKTMKKATLVSVSVTTMFYMLCGCMGYAAFGDLSPGNLLTGFGFYNPYWLLDIANAAIVIHLIGAYQVYCQPLFAFIEKQASIQFPDSEFIAKDIKIPIPGFKPLRLNVFRLIWRTVFVIITTVISMLLPFFNDVVGLLGALGFWPLTVYFPVEMYIAQKKIPRWSTRWVCLQVFSLGCLVVSIAAAAGSIAGVLLDLKSYKPFRSEY

SEQ ID NO: 546 - DNA, 1482 bp, Arabidopsis thaliana
  CDS (1)..(1482)
atgggtgaaaccgctgccgccaataaccaccgtcaccaccaccatcacggccaccaggtctttgacgtggccagccacgatttcgtccctccacaaccggcttttaaatgcttcgatgatgatggccgcctcaaaagaactgggactgtttggaccgcgagcgctcatataataactgcggttatcggatccggcgttttgtcattggcgtgggcgattgcacagctcggatggatcgctggccctgctgtgatgctattgttctctcttgttactctttactcctccacacttcttagcgactgctacagaaccggcgatgcagtgtctggcaagagaaactacacttacatggatgccgttcgatcaattctcggtgggttcaagttcaagatttgtgggttgattcaatacttgaatctctttggtatcgcaattggatacacgatagcagcttccataagcatgatggcgatcaagagatccaactgcttccacaagagtggaggaaaagacccatgtcacatgtccagtaatccttacatgatcgtatttggtgtggcagagatcttgctctctcaggttcctgatttcgatcagatttggtggatctccattgttgcagctgttatgtccttcacttactctgccattggtctagctcttggaatcgttcaagttgcagcgaatggagttttcaaaggaagtctcactggaataagcatcggaacagtgactcaaacacagaagatatggagaaccttccaagcacttggagacattgcctttgcgtactcatactctgttgtcctaatcgagattcaggatactgtaagatccccaccggcggaatcgaaaacgatgaagaaagcaacaaaaatcagtattgccgtcacaactatcttctacatgctatgtggctcaatgggttatgccgcttttggagatgcagcaccgggaaacctcctcaccggttttggattctacaacccgttttggctccttgacatagctaacgccgccattgttgtccacctcgttggagcttaccaagtctttgctcagcccatctttgcctttattgaaaaatcagtcgcagagagatatccagacaatgacttcctcagcaaggaatttgaaatcagaatccccggatttaagtctccttacaaagtaaacgttttcaggatggtttacaggagtggctttgtcgttacaaccaccgtgatatcgatgctgatgccgttttttaacgacgtggtcgggatcttaggggcgttagggttttggcccttgacggtttattttccggtggagatgtatattaagcagaggaaggttgagaaatggagcacgagatgggtgtgtttacagatgcttagtgttgcttgtcttgtgatctcggtggtcgccggggttggatcaatcgccggagtgatgcttgatcttaaggtctataagccattcaagtctacatattga

SEQ ID NO: 547 - protein, 493 aa, Arabidopsis thaliana
MGETAAANNHRHHHHHGHQVFDVASHDFVPPQPAFKCFDDDGRLKRTGTVWTASAHIITAVIGSGVLSLAWAIAQLGWIAGPAVMLLFSLVTLYSSTLLSDCYRTGDAVSGKRNYTYMDAVRSILGGFKFKICGLIQYLNLFGIAIGYTIAASISMMAIKRSNCFHKSGGKDPCHMSSNPYMIVFGVAEILLSQVPDFDQIWWISIVAAVMSFTYSAIGLALGIVQVAANGVFKGSLTGISIGTVTQTQKIWRTFQALGDIAFAYSYSVVLIEIQDTVRSPPAESKTMKKATKISIAVTTIFYMLCGSMGYAAFGDAAPGNLLTGFGFYNPFWLLDIANAAIVVHLVGAYQVFAQPIFAFIEKSVAERYPDNDFLSKEFEIRIPGFKSPYKVNVFRMVYRSGFVVTTTVISMLMPFFNDVVGILGALGFWPLTVYFPVEMYIKQRKVEKWSTRWVCLQMLSVACLVISVVAGVGSIAGVMLDLKVYKPFKSTY

SEQ ID NO: 548 - DNA, 1404 bp, Arabidopsis thaliana
  CDS (1)..(1404)
atggacattaaagaagatgacgagtctcgagttataacaccaaccgagcttcaacttcatgattcagttactgcaagaacaggaacgttatggacggcggtggcacatataataacaggagtgataggagctggagtgttgtcgttggcttgggccacggcggagctcggctggatcgctggtccggccgcccttatagccttcgccggggtcacacttctctctgcttttcttctttccgattgctaccgtttccctgatcctaacaacggtcccctccgactcaattcttactctcaagccgttaaattgtatttagggaagaagaatgaaattgtatgtggagtcgttgtatacatttccctttttggttgtggcattgcttataccattgttatagctacatgcagtagagcaattatgaaatcgaattgttatcatagaaatggacacaatgcaacatgttcatatggagacaacaacaactacttcatggttttgtttggtttgactcagatatttatgtcacaaatacctaatttccacaacatggtatggctctctcttgtcgccgctattatgtcttttacttactcgttcattggcatcggcctcgcccttggcaaaatcatagagaatcgaaaaattgagggaagtataaggggaataccagcagaaaacagaggtgaaaaggtatggatagtgttccaagctcttgggaacattgccttttcatatcctttctcaatcatacttcttgagattcaggacacattgagatcaccaccggcagagaagcaaacgatgaagaaagcctcgacggttgcggtattcatccaaacattcttcttcttctgttgtggatgttttgggtacgcggcctttggagattccaccccgggaaatctcttgaccggtttcggcttctatgagccattctggctcgtcgatttcgccaacgcttgcattgttcttcatttagttggtggatatcaggtatacagtcaaccaattttcgcggctgcggagagatcgctaaccaagaaatatccggaaaataagtttatcgccagattctacggattcaaactgccattgttgcgaggagagacggtgagattgaacccaatgaggatgtgtttgagaacgatgtacgtgttgatcacaacgggagtggcagtgatgtttccctacttcaatgaagtattaggagtggtgggggcacttgcattttggcctctggcagtgtattttcctgtggagatgtgtatattgcagaagaaaatccgaagttggacgcgaccatggcttcttcttagaggtttcagctttgtgtgcttgctcgtctgtctcttgtctcttgttggatctatttatggacttgttggagctaaattcggatga

SEQ ID NO: 549 - protein, 467 aa, Arabidopsis thaliana
MDIKEDDESRVITPTELQLHDSVTARTGTLWTAVAHIITGVIGAGVLSLAWATAELGWIAGPAALIAFAGVTLLSAFLLSDCYRFPDPNNGPLRLNSYSQAVKLYLGKKNEIVCGVVVYISLFGCGIAYTIVIATCSRAIMKSNCYHRNGHNATCSYGDNNNYFMVLFGLTQIFMSQIPNFHNMVWLSLVAAIMSFTYSFIGIGLALGKIIENRKIEGSIRGIPAENRGEKVWIVFQALGNIAFSYPFSIILLEIQDTLRSPPAEKQTMKKASTVAVFIQTFFFFCCGCFGYAAFGDSTPGNLLTGFGFYEPFWLVDFANACIVLHLVGGYQVYSQPIFAAAERSLTKKYPENKFIARFYGFKLPLLRGETVRLNPMRMCLRTMYVLITTGVAVMFPYFNEVLGVVGALAFWPLAVYFPVEMCILQKKIRSWTRPWLLLRGFSFVCLLVCLLSLVGSIYGLVGAKFG

SEQ ID NO: 550 - DNA, 1446 bp, Arabidopsis thaliana
  CDS (1)..(1446)
atggagaagaagaagagcatgttcgttgaacagagcttcccggagcatgaaattggcgatactaacaaaaactttgacgaggatggccgcgacaaaagaactgggacatggatgaccgggagtgcacacataataacggccgtgatagggtcgggagtgttgtctttggcgtgggcaatcgcacaacttggatgggtggcaggacccgccgtactaatggctttttctttcataacatattttacatcaaccatgcttgccgattgttaccgttcccctgaccctgttaccggcaaacgcaactacacctacatggaagttgtccgatcctatctaggaggaagaaaagtgcaattatgtggattggctcaatacgggaatctgattggaataacaatcggctacacaatcacagcttcaattagcatggtggcagtgaagaggtcgaattgtttccacaaaaatgggcataatgttaaatgtgccacttcaaacactcccttcatgatcatatttgcaatcatccaaattattcttagccaaatcccaaatttccataacctctcttggctctccattcttgcggccgtaatgtccttttgttatgcctccatcggtgttggtctctccatcgccaaagcggcgggtggcggtgagcacgtaagaacaacactgacaggagttacggtcgggattgatgtatcgggtgccgagaaaatatggagaacgttccaagcgattggggacattgcatttgcctacgcatactcaactgttctcattgaaatacaggacaccttgaaagcaggtcctccatcggagaacaaagccatgaaaagagcaagccttgtgggtgtctccacaacaaccttcttctacatgttatgcggttgtgttggttacgctgcctttggaaatgatgctcctggaaatttcctaactggttttggtttctatgagccattctggctaatcgactttgccaatgtctgcatcgccgtgcaccttatcggcgcctaccaagtcttttgtcaaccaatttttcagttcgtagagagccagagcgcgaaacgttggcctgataacaagtttattacaggagaatacaaaatccatgtcccttgctgtggtgattttagtatcaacttcctcagattggtatggaggacttcatatgttgtggtcaccgcggttgtagccatgatcttccctttcttcaacgatttcttgggtcttattggagcagcttccttctggcctttgactgtttactttcccattgagatgcatattgctcagaagaagataccgaaattctctttcacttggacttggttaaaaatcttgagttggacttgtttcattgtgtccctcgttgctgcagccggatcagtgcaaggactcatacaaagtctcaaggatttcaagcctttccaggctccttag

SEQ ID NO: 551 - protein, 481 aa, Arabidopsis thaliana
MEKKKSMFVEQSFPEHEIGDTNKNFDEDGRDKRTGTWMTGSAHIITAVIGSGVLSLAWAIAQLGWVAGPAVLMAFSFITYFTSTMLADCYRSPDPVTGKRNYTYMEVVRSYLGGRKVQLCGLAQYGNLIGITIGYTITASISMVAVKRSNCFHKNGHNVKCATSNTPFMIIFAIIQIILSQIPNFHNLSWLSILAAVMSFCYASIGVGLSIAKAAGGGEHVRTTLTGVTVGIDVSGAEKIWRTFQAIGDIAFAYAYSTVLIEIQDTLKAGPPSENKAMKRASLVGVSTTTFFYMLCGCVGYAAFGNDAPGNFLTGFGFYEPFWLIDFANVCIAVHLIGAYQVFCQPIFQFVESQSAKRWPDNKFITGEYKIHVPCCGDFSINFLRLVWRTSYVVVTAVVAMIFPFFNDFLGLIGAASFWPLTVYFPIEMHIAQKKIPKFSFTWTWLKILSWTCFIVSLVAAAGSVQGLIQSLKDFKPFQAP

SEQ ID NO: 552 - DNA, 1401 bp, Arabidopsis thaliana
  CDS (1)..(1401)
atggatgttccacggccagctttcaaatgttttgatgacgatggccggcttaaacgttcagggacggtttggaccgcgagtgcgcatatcataaccgccgtgattggatctggtgttctatcgcttgcgtgggctataggtcaactcggttggatcgcaggtcctacagtgatgttgttgttctcttttgtcacttactactcttccacgcttcttagcgactgctacagaaccggagatcctgtctctgggaagagaaactatacttacatggacgctgtccgatcaatcctaggtggctttaggttcaagatttgtgggctgattcagtatttgaatctgtttggtatcacggtcgggtacacaatcgcagcatctataagtatgatggcgatcaagaggtccaactgtttccacgagagcggagggaaaaacccgtgtcacatgtcgagcaatccatacatgatcatgtttggtgtgaccgagatcttgctctctcagatcaaagattttgaccagatttggtggctctccattgtcgctgctatcatgtccttcacatactctgcaatcggtttagctctcggaatcattcaagtcgcggcaaatggagttgtcaagggaagtctcaccggaattagcatcggcgcagtgactcagacccaaaaaatatggagaacctttcaagcacttggagacattgcctttgcttattcatactctgttgttcttattgaaattcaggacactgtaagatctccaccagcagaatcaaaaacgatgaagatcgccacaagaatcagcatcgctgttacaacgacattttacatgctatgtggttgtatgggctatgccgccttcggagataaagcaccgggaaacctcttaaccggttttggtttctacaatccgttttggctccttgacgtggctaacgctgccatagttatccaccttgtaggagcttatcaagtctttgctcagcccatcttcgcctttattgagaaacaagctgccgctaggtttcccgacagtgacttggtgaccaaggaatacgaaatccgaatccctggttttaggtcaccgtacaaagtcaacgttttcagagcagtttaccgaagcgggtttgtggttttgaccactgtgatatccatgcttatgccgtttttcaacgacgtcgtagggattttaggtgcgttagggttttggcctttgacggtttactttccggtggagatgtatataagacagaggaaggttgagagatggagtatgaagtgggtttgtctgcagatgttgagctgtggttgtttgatgatcacgttggtcgccggagttggctccatcgccggagtaatgctagaccttaaggtttacaagccgttcaagactacttactaa

SEQ ID NO: 553 - protein, 466 aa, Arabidopsis thaliana
MDVPRPAFKCFDDDGRLKRSGTVWTASAHIITAVIGSGVLSLAWAIGQLGWIAGPTVMLLFSFVTYYSSTLLSDCYRTGDPVSGKRNYTYMDAVRSILGGFRFKICGLIQYLNLFGITVGYTIAASISMMAIKRSNCFHESGGKNPCHMSSNPYMIMFGVTEILLSQIKDFDQIWWLSIVAAIMSFTYSAIGLALGIIQVAANGVVKGSLTGISIGAVTQTQKIWRTFQALGDIAFAYSYSVVLIEIQDTVRSPPAESKTMKIATRISIAVTTTFYMLCGCMGYAAFGDKAPGNLLTGFGFYNPFWLLDVANAAIVIHLVGAYQVFAQPIFAFIEKQAAARFPDSDLVTKEYEIRIPGFRSPYKVNVFRAVYRSGFVVLTTVISMLMPFFNDVVGILGALGFWPLTVYFPVEMYIRQRKVERWSMKWVCLQMLSCGCLMITLVAGVGSIAGVMLDLKVYKPFKTTY

SEQ ID NO: 554 - DNA, 1398 bp, Oryza sativa (japonica cultivar-group)
  CDS (1)..(1398)
atgaacaagaacgccgcaccggaagacgtcgagagcggcgagcacgagcggacagggacggtatggacggcgacggcgcacattgttacggcggtgatcggctccggcgtgctggcgctggcgtggagcgtggcgcagctgggttgggtggccgggccgctcgccctcgccggcttcgcctgcgtcacctactacacctccactctgctcgccaacgcctaccgcgcgccgcaccccgtcaccggcaccaggaaccgcacatacatggacgccgtcagatcatacctcagtcctagagaggtgttcatgtgcggaatcgcgcagtacgtcaacctgtggggcaccatggtcggctacacaatcaccgcaaccataagcatggtcgcgatcaggaggtcggattgcatccatcggaacggcgccggcgccgccgcgcggtgcgacaacacgtcggcgacggtgctcatgctggcgttcagcatcgtgcaggtggtgctgtcccagttcccgggcctggagcacatcacctggctgtccgtcgtcgccgccgtcatgtcgttcgcctactccttcatcggcctcggcctgtccgtggcggagtgggtgtcgcacggcggccacctcagcggcaggatccagggcgccaccgcggcgtcctccagcaagaagctctggaacgtactgctcgcactggggaacatcgccttcgcctacacctttgcagaagtgctaattgagatccaggacacactgaaaccgtcaccaccggagaacaagaccatgaagaaggcagcgatgtacgggattggagccaccaccatcttctacatctccgttggctgcgccgggtacgccgcgttcggttcagatgctccgggcaacatcctgacggcgtccggtatggggcccttctggctcgtcgacattgccaacatgtgcctcatcctccatctcatcggagcatatcaggtttatgcacagcccatatttgcgacaatggagagatggatctcctcccggtggccggaggccaagttcatcaacagcgagtacaccgtaaacgtgccgctgatccagcgaggatcggtgaccgtggcgccgtacaagctcgtcctccggaccgtcgtagtcatcgcgacgacggtggtggcgatgatgataccgttcttcaacgcggtgctggggctcctcggcgccttcagcttctggccactgactgtttacttccccatcagcatgcacattgcgcaggagaagatcaccaggggagggaggtggtatctcctgcaaggcctgagcatggtgtgcttgatgatctcggtggcagtgggcattggctctgtcactgacattgttgatagcctgaaggttgcaacccctttcaaaactgtcagctaa

SEQ ID NO: 555 - protein, 465 aa, Oryza sativa (japonica cultivar-group)
MNKNAAPEDVESGEHERTGTVWTATAHIVTAVIGSGVLALAWSVAQLGWVAGPLALAGFACVTYYTSTLLANAYRAPHPVTGTRNRTYMDAVRSYLSPREVFMCGIAQYVNLWGTMVGYTITATISMVAIRRSDCIHRNGAGAAARCDNTSATVLMLAFSIVQVVLSQFPGLEHITWLSVVAAVMSFAYSFIGLGLSVAEWVSHGGHLSGRIQGATAASSSKKLWNVLLALGNIAFAYTFAEVLIEIQDTLKPSPPENKTMKKAAMYGIGATTIFYISVGCAGYAAFGSDAPGNILTASGMGPFWLVDIANMCLILHLIGAYQVYAQPIFATMERWISSRWPEAKFINSEYTVNVPLIQRGSVTVAPYKLVLRTVVVIATTVVAMMIPFFNAVLGLLGAFSFWPLTVYFPISMHIAQEKITRGGRWYLLQGLSMVCLMISVAVGIGSVTDIVDSLKVATPFKTVS

SEQ ID NO: 556 - DNA, 1596 bp, Oryza sativa (japonica cultivar-group)
  CDS (1)..(1596)
atggacgtggagaaggtggagaggaaggaggtggccgtcgacgacgatggccgcgtcagaacagatctgcgagcctctgtcattgctgaatttggacagaaacgtgcattgctggcgtacgttggagggtggttattgacttgtgcctctctttcaaccgcgctgatatggcaatctcttcaatgcactgcatctttattgatgttcatgcttaatcagccaggtgttccaagagaccaagaaggcaagaatgtcacacgaacggtatggacggcgacgacgcacgccatcaccgccgtgatcgggtcaggcgtgctggcgctgccgtggagcgtggcccagatggggtgggtgctcggccccatcgccctcgtcgtctgcgcctacatcacctactacaccgccgtcctcctctgcgactgctaccgcacgccggaccccgtccacggcaagcggaactacacctacatggacgtcgtccgctcatgcctcgggcctcgagacgtggtcgtgtgtggcattgcgcagtacgcgattctctggggcgcaatggtgggttacaccatcacgaccgctacgagcatcatgtcagtggtgcgcacgaactgccaccactacaaggggccggacgcgacctgcggctcgtccgggacgatgtacatggtgctgttcggcctcgcggaggtcgtcctgtcccagtgcccgagcctggagggggtgacgctcatctccgtcgtcgccgccgtcatgtcgttcacctactccttcgtcgggctcttcctcagcgccgctaaggtcgcgtcgcacggcgcggcgcacggcaccctcctcggcgtcagggtcggcgccggaggcgtcaccgcgtcgaccaaggcgtggcacttcctgcaggcgctcgggaacatcgccttcgcgtacacctactccatgctgctcatcgagatccaggacacggtgaagtcgccgccgtcggagaacgtgacgatgaagagggcgagcctgtacggcatcggcgtcacgaccgtcttctacgtgtcgatcgggtgcgtcgggtacgcggcgttcggcaacgccgcgcccgggaacgtcctcaccggcttcctcgagccgttctggctcgtcgacatcgccaacgttgccgtcgtcatccacctggtcggagcgtaccaggtgtacgcgcagccggtgttcgcgtgctacgagaagtggctggcgagccgttggccggagtcggcgttcttccaccgggagtacgcggtgccgctgggcggcgggcgcgcggtgcggttcacgctgtgcaagctggtgctgcgcacggcgttcgtggccgtgacgacggtggtgtcgctggtgctgccgttcttcaacgccgtgctcgggctgctcggcgccgtcgcgttctggccgctcacggtgtacttcccggtgaccatgtacatggcgcaggcgaaggtgcagagaggcagccggaagtgggtggcgctgcaggcgctcaacgtcggcgcgctcgtcgtgtcgctgctcgcggcggtgggctcggtggccgacatggcgcagcgcctgcgccacgtcaccatcttccaaacgcagctctga

SEQ ID NO: 557 - protein, 531 aa, Oryza sativa (japonica cultivar-group)
MDVEKVERKEVAVDDDGRVRTDLRASVIAEFGQKRALLAYVGGWLLTCASLSTALIWQSLQCTASLLMFMLNQPGVPRDQEGKNVTRTVWTATTHAITAVIGSGVLALPWSVAQMGWVLGPIALVVCAYITYYTAVLLCDCYRTPDPVHGKRNYTYMDVVRSCLGPRDVVVCGIAQYAILWGAMVGYTITTATSIMSVVRTNCHHYKGPDATCGSSGTMYMVLFGLAEVVLSQCPSLEGVTLISVVAAVMSFTYSFVGLFLSAAKVASHGAAHGTLLGVRVGAGGVTASTKAWHFLQALGNIAFAYTYSMLLIEIQDTVKSPPSENVTMKRASLYGIGVTTVFYVSIGCVGYAAFGNAAPGNVLTGFLEPFWLVDIANVAVVIHLVGAYQVYAQPVFACYEKWLASRWPESAFFHREYAVPLGGGRAVRFTLCKLVLRTAFVAVTTVVSLVLPFFNAVLGLLGAVAFWPLTVYFPVTMYMAQAKVQRGSRKWVALQALNVGALVVSLLAAVGSVADMAQRLRHVTIFQTQL

SEQ ID NO: 558 - DNA, 1467 bp, Oryza sativa (japonica cultivar-group)
  CDS (1)..(1467)
atgggggagaacgtggttggcacgtactactacccgccttcggcggccgccatggacggcgtggagctcggccacgccgccgccggctccaagctcttcgacgacgacggccgccccaggcgcaacgggacgatgtggacggcgagcgcgcacatcatcacggcggtgatcggctccggcgtgctgtcgctggggtgggccatcgcgcagctcggctgggtggccgggccggcggtcatggtgctcttctccctcgtcacctactacacctcatccctcctctccgattgctaccgctccggcgaccccgtcaccggcaagcggaactacacctacatggacgccgtgaacgccaacctgagcgggttcaaggtgaagatctgcgggttcttgcagtacgccaacatcgtcggcgtcgccatcggctacaccatcgcggcgtccatcagcatgctggcgatcgggagggccaactgcttccacaggaaggggcacggcgacccgtgcaacgtctccagcgtgccctacatgatcgtcttcggcgtcgccgaggtcttcttctcgcagatccccgacttcgatcagatctcctggctctccatgctcgccgccgtcatgtccttcacctactccgtcatcggcctcagcctcggcatcgtccaagtcgtcgcgaacggagggttgaagggaagcctgaccgggatcagcatcggcgtggtgacgccgatggacaaggtgtggaggagcctgcaggcgttcggcgacatcgcgttcgcctactcctactcgctgatcctcatcgagatccaggacaccatccgggcgccgccgccgtcggagtcggcggtgatgaagcgcgccacggtggtgagcgtggcggtgaccacggtgttctacatgctctgcggcagcatggggtacgcggcgttcggcgacgacgcgccggggaacctcctcaccgggttcggcttctacgagcccttctggctcctcgacatcgccaacgccgccatcgtcgtccacctcgtcggcgcctaccaggtgttctgccagccgctcttcgccttcgtcgagaagtgggcggcgcagcggtggccggagtcgccgtacatcaccggggaggtggagctccgcctctcgccgtcgtcgaggcggtgcagggtgaacctgttccggtcgacgtggcgcacggcgttcgtcgtcgccaccacggtggtgtccatgctgctgcccttcttcaacgacgtggtcggcttcctcggcgcgctcggattctggccgctcaccgtctacttccccgtggagatgtacgtggtgcagaagaaggtgccacggtggagcacacggtgggtgtgcctgcagatgctcagcgtcggctgcctcgtcatctccatcgccgccgccgcgggctccatcgccggcgtcatgtcggatctcaaggtttaccgcccgttcaagggttactga

SEQ ID NO: 559 - protein, 488 aa, Oryza sativa (japonica cultivar-group)
MGENVVGTYYYPPSAAAMDGVELGHAAAGSKLFDDDGRPRRNGTMWTASAHIITAVIGSGVLSLGWAIAQLGWVAGPAVMVLFSLVTYYTSSLLSDCYRSGDPVTGKRNYTYMDAVNANLSGFKVKICGFLQYANIVGVAIGYTIAASISMLAIGRANCFHRKGHGDPCNVSSVPYMIVFGVAEVFFSQIPDFDQISWLSMLAAVMSFTYSVIGLSLGIVQVVANGGLKGSLTGISIGVVTPMDKVWRSLQAFGDIAFAYSYSLILIEIQDTIRAPPPSESAVMKRATVVSVAVTTVFYMLCGSMGYAAFGDDAPGNLLTGFGFYEPFWLLDIANAAIVVHLVGAYQVFCQPLFAFVEKWAAQRWPESPYITGEVELRLSPSSRRCRVNLFRSTWRTAFVVATTVVSMLLPFFNDVVGFLGALGFWPLTVYFPVEMYVVQKKVPRWSTRWVCLQMLSVGCLVISIAAAAGSIAGVMSDLKVYRPFKGY

SEQ ID NO: 560 - DNA, 1557 bp, Oryza sativa (japonica cultivar-group)
  CDS (1)..(1557)
atgttgccgagaagccgaacgctcccgccaaggattcatgatggcgtcgtggtggtagaacgcgatgtgaggaggtaccagcagctgccgcagcaggtggagatggagatgacgacgaccaagaggcagcaggatcatcaggtggagacgatgacgacgaagaagattgatgaagaagatgaagaggtggacgacgacggtcgggcgaagcggagggggacggtgtggacggcggcgtcgcacatcatcacggcggtgatcgggtcaggtgtgctgtcgctggcgtgggcgatcgcgcagctgggctgggtggtgggccccaccgtcatgctcctctttgctgccgtcatctacttcacctccaacctcctcgccgactgctaccgcaccggcgaccccgccaccggcagaaggaactacacctacatggacgccgtcaaggccaacctcggcggtgccaaggtgaaggtttgcggatgcattcagtacctcaaccttttgggagtggccatcggttacaccatcgccgcctccattagcatgatggcgatccagcgttccaactgcttccacgcgagaggagagcaggatccatgccacgcctccagcaacgtgtacatgatcatgttcggcatcgtccaggtgttcttctcccagatccccgacttcgaccaagtctggtggctctccatcctcgccgccgtcatgtccttcacctactccgccgtcggcctcgccctcggcgccgcccaggtcgcccagaaccgcacgttcgccggcagcgccatgggcgtcgccgtgggcttcgtcaccaagaccggcgacgtcgtcacccccgcgcagaaggtgtggcgcaacctgcaggcgctgggggacatcgccttcgcctactcctactccatcatcctcatcgagatccaggacacgctgcggtcgccgccggcggaggcgaggacgatgcggaaggcgacggggatcagcgtggtggtgacgagcgtgttctacctgctgtgcggatgcatggggtacgcggcgttcggcgacgacgcgccggggaacctcctcaccggcttcggcttctacaagccctactggctgctggacgtggccaacatggcgatcgtggtacacctggtgggggcgtaccaggtgtactgccagccgctcttcgccttcgtggagaggagggcggagcggcggtggcccaacggcctccccggcggcgactacgacctggggtggataaaggtgagcgtgttcaggttggcgtggcggacgtgcttcgtggcggtgacgacggtggtggcgatgctgctgcccttcttcaacgacgtggtgggcatcctgggggcgctcggcttctggccgctcaccgtctacttccccgtcgagatgtacatcgcccaccgccgcatccggaggtggacaaccacctgggtcggcctgcaggcgctcagcctcgcctgccttctcgtctcgctcgccgccgccgtcggctccatcgccggcgtcctgctcgacctcaagtcctaccgtccattccgctccacctactaa

SEQ ID NO: 561 - protein, 518 aa, Oryza sativa (japonica cultivar-group)
MLPRSRTLPPRIHDGVVVVERDVRRYQQLPQQVEMEMTTTKRQQDHQVETMTTKKIDEEDEEVDDDGRAKRRGTVWTAASHIITAVIGSGVLSLAWAIAQLGWVVGPTVMLLFAAVIYFTSNLLADCYRTGDPATGRRNYTYMDAVKANLGGAKVKVCGCIQYLNLLGVAIGYTIAASISMMAIQRSNCFHARGEQDPCHASSNVYMIMFGIVQVFFSQIPDFDQVWWLSILAAVMSFTYSAVGLALGAAQVAQNRTFAGSAMGVAVGFVTKTGDVVTPAQKVWRNLQALGDIAFAYSYSIILIEIQDTLRSPPAEARTMRKATGISVVVTSVFYLLCGCMGYAAFGDDAPGNLLTGFGFYKPYWLLDVANMAIVVHLVGAYQVYCQPLFAFVERRAERRWPNGLPGGDYDLGWIKVSVFRLAWRTCFVAVTTVVAMLLPFFNDVVGILGALGFWPLTVYFPVEMYIAHRRIRRWTTTWVGLQALSLACLLVSLAAAVGSIAGVLLDLKSYRPFRSTY

SEQ ID NO: 562 - DNA, 1401 bp, Oryza sativa (japonica cultivar-group)
  CDS (1)..(1401)
atggcgctcggcgacggggacgacggcgcggccgccgccgccgttcctctcatctcggatcgccccaagcatgccgccatcgtcagaagcgggacggagtggacggcggcggcgcacgtgatcacggcggtgatcgggtccggggtgctgtcgctggcgtggagcgtggcgcagctggggtggctggcggggccggggatgatgctcgtgttcgcggccgtgacggcgctgcagtcggcgctgttcgccgactgctaccgctcgccggacccggaggtcggcccgcaccgcaaccgcacctacgccaacgccgtcgagcgcaacctaggtagctcgagcgcgtgggtctgcttgttgctgcagcaaacggccttgttcggctacggcatcgcctacaccatcaccgcctccatcagttgcagggcgatcctgaggtccaactgctaccacacgcacggccacgacgcgccctgcaaatacgggggtagctactacatgctcatgttcggcgcggcgcagctgttcctctccttcataccggacttccacgacatggcgtggctgtcggtcctcgccgcggtcatgtcgttctcctactcgttcatcggcctcggcctcggcctcgccaacacaattgctaatggaacgatcaaaggaagcataacaggtgctccaacgagaacccctgtgcagaaggtctggcacgtctcgcaggccatcggcgacatcgcattcgcgtacccgtactcattaatcctcttggaaattcaggacacactgaaggctccaccggccgagaacaagacgatgaagaaggcgtccatcatctcgatcgtcgtcaccaccttcttctacctctgctgcggctgcttcggctacgccgccttcgggagcgacgcccctggcaacctcctcaccggcttcggcttctacgagccctactggctcatcgacttcgccaacgcctgcatcatcctccacctgctcggcggctaccaggtgtacagccagccgatataccagttcgcggacaggttcttcgcggagaggtacccggcgagccggttcgtgaacgacttccacacggtgaagctgccgctgctgccgccgtgtcgggtgaacctcctgcgggtgtgcttccggacggtgtacgtggcgagcaccacggcggtggcgctcgccttcccctacttcaacgaggtgctcgcgctgctcggcgccctcaacttctggccgctcgccatctacttccccgtggagatgtacttcatccagcgccatgtcccgcggtggtcgccccggtgggtcgtgctgcagtcgttcagcgtcctctgcctcctcgtcagcgccttcgcgctcgtcggctccatccagggcctcatcagccagaagctaggctaa

SEQ ID NO: 563 - protein, 466 aa, Oryza sativa (japonica cultivar-group)
MALGDGDDGAAAAAVPLISDRPKHAAIVRSGTEWTAAAHVITAVIGSGVLSLAWSVAQLGWLAGPGMMLVFAAVTALQSALFADCYRSPDPEVGPHRNRTYANAVERNLGSSSAWVCLLLQQTALFGYGIAYTITASISCRAILRSNCYHTHGHDAPCKYGGSYYMLMFGAAQLFLSFIPDFHDMAWLSVLAAVMSFSYSFIGLGLGLANTIANGTIKGSITGAPTRTPVQKVWHVSQAIGDIAFAYPYSLILLEIQDTLKAPPAENKTMKKASIISIVVTTFFYLCCGCFGYAAFGSDAPGNLLTGFGFYEPYWLIDFANACIILHLLGGYQVYSQPIYQFADRFFAERYPASRFVNDFHTVKLPLLPPCRVNLLRVCFRTVYVASTTAVALAFPYFNEVLALLGALNFWPLAIYFPVEMYFIQRHVPRWSPRWVVLQSFSVLCLLVSAFALVGSIQGLISQKLG

SEQ ID NO: 564 - DNA, 1467 bp, Oryza sativa (japonica cultivar-group)
  CDS (1)..(1467)
atgtcgctcgccgacgacctggccgccgtcgagcgcggcggccacatggtgccatcgaaggcggcgggtgtcgacggcgacggggagccgcggcggacgggcaccatgtggacggcgagcgcgcacatcatcacggcggtgatcgggtccggcgtgctgtcgctggcgtggggcgtcgcgcagctggggtgggtggccggccccgcggtgatgctgctgttcggcgccgtcatctactgctgctccgtgctcctcgtcgagtgctaccgcaccggcgacccgtacaccggccagcgcaaccgcacctacatggacgccgtccgcgccaacctcggcgggaccaaggtgaggctctgcggcgtgctgcagttcgccaacttcttcggcgtctgcgtcggcatcaccatcgcctcctccatcagcatgctggcgatcaagagggcggggtgcttccacgtgagagggcacgaccagagggaggcgtgcggcggctcgagccggccgtacatggtggtgtacggcgcgctgcaggtcgtgttctcgcagatccccaacctccacaagatgtggtggctctccacgctcgcctccgccatgtcgctgtcctactccgccatcggcatcgccctcggcgtcgcgcagatcgtagcgaacgggggaatcaggggcaccatcacgggcgtcttcgtcggcgccggcgccggcgtcacctcgatgcagaaggtttggcggagcttccaggcgttcgggaacatcgcgttcgcatacggcttctcgttcatcctcctcgagatccatgacacggtgaagccggtggcgccgccgtcgacggagacgaaggtgatgaggaaagcggtggcggtgagcgtggcgacgacgacggcggtgtacctgatgtgcgggtgcgtcgggtacgcggcgttcgggaacgactcgccggacaacctcctcaccgggttcgggttcttcgagcccttctggctgctcgacctcgccaacgccggcgtcgtggtgcacctcgtaggcacgtaccaggtggtggcgcagccggtgttcgcgttcctcgacgggcgcgccgcggcgggcgcgtggcccgggagcgcggcgctgggcaagaggaggcgggtgctccgcgtgggctccctggccgagatcgaggtgagcccgttccgtctggcgtggcgcacggcgttcgtgtgcgtgaccacggcggcgtccacgctgctcccgttcttcggctccatggtggggctcatcggcgcggcgtcgttctggccgctcaccgtctacttccccgtggagatgtacatcgcgcagcgccgggtgccgcgggggagcgcgcagtggctgtccctccaggcgctcagcgccgggtgcctcgtcgtgtccgtcgccgcctcggcgggatccatcgccggcgtcgtggaggcgttcaaggcgcacaacccgttctgctggacgtgctga

SEQ ID NO: 565 - protein, 488 aa, Oryza sativa (japonica cultivar-group)
MSLADDLAAVERGGHMVPSKAAGVDGDGEPRRTGTMWTASAHIITAVIGSGVLSLAWGVAQLGWVAGPAVMLLFGAVIYCCSVLLVECYRTGDPYTGQRNRTYMDAVRANLGGTKVRLCGVLQFANFFGVCVGITIASSISMLAIKRAGCFHVRGHDQREACGGSSRPYMVVYGALQVVFSQIPNLHKMWWLSTLASAMSLSYSAIGIALGVAQIVANGGIRGTITGVFVGAGAGVTSMQKVWRSFQAFGNIAFAYGFSFILLEIHDTVKPVAPPSTETKVMRKAVAVSVATTTAVYLMCGCVGYAAFGNDSPDNLLTGFGFFEPFWLLDLANAGVVVHLVGTYQVVAQPVFAFLDGRAAAGAWPGSAALGKRRRVLRVGSLAEIEVSPFRLAWRTAFVCVTTAASTLLPFFGSMVGLIGAASFWPLTVYFPVEMYIAQRRVPRGSAQWLSLQALSAGCLVVSVAASAGSIAGVVEAFKAHNPFCWTC

SEQ ID NO: 566 - DNA, 1464 bp, Oryza sativa (japonica cultivar-group)
  CDS (1)..(1464)
atggggatggagaggccgcaagagaaggtggccaccaccaccaccgccgccttcaacctcgccgagtccggctacgccgaccgccccgacctcgacgacgacggccgcgagaagcgcacagggacgctggtgacggcgagcgcgcacataataacggcggtgatcggctccggcgtgctgtcgctggcgtgggcgatagcgcagctggggtgggtgatcgggccggccgtgctggtggcgttctcggtcataacctggttctgctccagcctcctcgccgactgctaccgatctcccgaccccgtccatggcaagcgcaactacacctacggccaagccgtcagggccaacctaggtgtggccaagtacaggctctgctcggtggcacagtacgtcaatctcgtcggcgtcaccattggctacaccatcactacggccatcagcatgggtgcgatcaaacggtccaactggttccatcgcaacggccacgacgcagcctgcttggcatctgacacgaccaacatgatcatatttgctggcatccaaatcctcctctcgcagctgccgaattttcacaaaatttggtggctctccattgtcgctgctgtcatgtcactggcctactcaaccattggccttggcctctccattgcaaaaattgcaggtggggcccaccccgaggcaaccctcacaggggtgactgttggagtggatgtgtctgcaagtgagaaaatctggagaacttttcagtcacttggtgacattgcctttgcatactcctactccaatgtcctcatagaaattcaggacacgctgcggtcgagcccggcggagaacgaggtgatgaagaaggcgtcgttcatcggagtctcgacgacgacgacgttctacatgctgtgcggcgtgctcggctacgcggcgttcggcaaccgcgcgccggggaacttcctcaccggcttcggcttctacgagcccttctggctcgtcgacgtcggcaacgtctgcatcgtcgtccacctcgtcggcgcctaccaggtcttctgccagcccatctaccagttcgccgaggcctgggcgcgctcgcggtggccggacagcgccttcgtcaacggcgagcgcgtgctccggctgccgctcggcgccggcgacttccccgtcagcgcgctccgcctcgtctggcgcacggcctacgtcgtgctcaccgccgtcgccgccatggcgttccccttcttcaacgacttcctcggcctcatcggcgccgtctccttctggccgctcaccgtctacttccccgtccagatgtacatgtctcaggccaaggtccggcgattctcgccgacgtggacgtggatgaacgtgctcagcctcgcctgcctcgtcgtctccctcctcgccgccgccggctccatccagggcctcatcaaatccgtcgcacattacaagccattcagcgtctcctcatga

SEQ ID NO: 567 - protein, 487 aa, Oryza sativa (japonica cultivar-group)
MGMERPQEKVATTTTAAFNLAESGYADRPDLDDDGREKRTGTLVTASAHIITAVIGSGVLSLAWAIAQLGWVIGPAVLVAFSVITWFCSSLLADCYRSPDPVHGKRNYTYGQAVRANLGVAKYRLCSVAQYVNLVGVTIGYTITTAISMGAIKRSNWFHRNGHDAACLASDTTNMIIFAGIQILLSQLPNFHKIWWLSIVAAVMSLAYSTIGLGLSIAKIAGGAHPEATLTGVTVGVDVSASEKIWRTFQSLGDIAFAYSYSNVLIEIQDTLRSSPAENEVMKKASFIGVSTTTTFYMLCGVLGYAAFGNRAPGNFLTGFGFYEPFWLVDVGNVCIVVHLVGAYQVFCQPIYQFAEAWARSRWPDSAFVNGERVLRLPLGAGDFPVSALRLVWRTAYVVLTAVAAMAFPFFNDFLGLIGAVSFWPLTVYFPVQMYMSQAKVRRFSPTWTWMNVLSLACLVVSLLAAAGSIQGLIKSVAHYKPFSVSS

SEQ ID NO: 568 - DNA, 1383 bp, Oryza sativa (japonica cultivar-group)
  CDS (1)..(1383)
atggcggcggccggacgaacacttggatgcatatatgcagggacgctggtgacggcgagcgcgcacataataacggcggtgatcggctccggcgtgctgtcgctggcgtgggcgatagcgcagctggggtgggtgatcgggccggccgtgctggtggcgttctcggtcataacctggttctgctccagcctcctcgccgactgctaccgatctcccgaccccgtccatggcaagcgcaactacacctacggccaagccgtcagggccaacctaggtgtggccaagtacaggctctgctcggtggcacagtacgtcaatctcgtcggcgtcaccattggctacaccatcactacggccatcagcatgggtgcgatcaaacggtccaactggttccatcgcaacggccacgacgcagcctgcttggcatctgacacgaccaacatgatcatatttgctggcatccaaatcctcctctcgcagctgccgaattttcacaaaatttggtggctctccattgtcgctgctgtcatgtcactggcctactcaaccattggccttggcctctccattgcaaaaattgcaggtggggcccaccccgaggcaaccctcacaggggtgactgttggagtggatgtgtctgcaagtgagaaaatctggagaacttttcagtcacttggtgacattgcctttgcatactcctactccaatgtcctcatagaaattcaggacacgctgcggtcgagcccggcggagaacgaggtgatgaagaaggcgtcgttcatcggagtctcgacgacgacgacgttctacatgctgtgcggcgtgctcggctacgcggcgttcggcaaccgcgcgccggggaacttcctcaccggcttcggcttctacgagcccttctggctcgtcgacgtcggcaacgtctgcatcgtcgtccacctcgtcggcgcctaccaggtcttctgccagcccatctaccagttcgccgaggcctgggcgcgctcgcggtggccggacagcgccttcgtcaacggcgagcgcgtgctccggctgccgctcggcgccggcgacttccccgtcagcgcgctccgcctcgtctggcgcacggcctacgtcgtgctcaccgccgtcgccgccatggcgttccccttcttcaacgacttcctcggcctcatcggcgccgtctccttctggccgctcaccgtctacttccccgtccagatgtacatgtctcaggccaaggtccggcgattctcgccgacgtggacgtggatgaacgtgctcagcctcgcctgcctcgtcgtctccctcctcgccgccgccggctccatccagggcctcatcaaatccgtcgcacattacaagccattcagcgtctcctcatga

SEQ ID NO: 569 - protein, 460 aa, Oryza sativa (japonica cultivar-group)
MAAAGRTLGCIYAGTLVTASAHIITAVIGSGVLSLAWAIAQLGWVIGPAVLVAFSVITWFCSSLLADCYRSPDPVHGKRNYTYGQAVRANLGVAKYRLCSVAQYVNLVGVTIGYTITTAISMGAIKRSNWFHRNGHDAACLASDTTNMIIFAGIQILLSQLPNFHKIWWLSIVAAVMSLAYSTIGLGLSIAKIAGGAHPEATLTGVTVGVDVSASEKIWRTFQSLGDIAFAYSYSNVLIEIQDTLRSSPAENEVMKKASFIGVSTTTTFYMLCGVLGYAAFGNRAPGNFLTGFGFYEPFWLVDVGNVCIVVHLVGAYQVFCQPIYQFAEAWARSRWPDSAFVNGERVLRLPLGAGDFPVSALRLVWRTAYVVLTAVAAMAFPFFNDFLGLIGAVSFWPLTVYFPVQMYMSQAKVRRFSPTWTWMNVLSLACLVVSLLAAAGSIQGLIKSVAHYKPFSVSS

SEQ ID NO: 570 - DNA, 1461 bp, Ricinus communis
  CDS (1)..(1461)
atggttgagaacacagcagccaagaaccatccgcaccaggtttttgatgtatccattaacatgcaaactcaagttgttggctctaaatggcttgatgatgatggccgtaccaagagaactgggaccgtgtggactgcaagtgcccacatcataacagcagtgatagggtctggagttctgtctttagcttgggcaatcgctcagcttgggtggattgctggccctgctgttatgttcttgttctctttagtcacttactatacttctactcttctatctgcctgctaccgttctggtgatcctgtcaatggcaagaggaactatacttatatggacgctgttcgcaccaatcttggtggagctaaggtcaagttatgtggatttgttcagtatctgaatcttttcggagttgccattggatacactatcgcgtcgtctattagtatgatggctataaagaggtctaattgttttcacaagagcggaggcaaaaacccatgccatataaatgccaatccttacatgattgcattcggaattgctgaaatcattttctctcaaattcctgattttgatcagctatggtggctctccattcttgctgcagtcatgtcctttacttactcaaccattggtcttggacttggaattgctcaagttgtagaaaatggaaaagccatgggaagtgtgaccggaattagcattggagcgaatgtgactccaacccagaagatatggaggagcttccaagctcttggtgacattgctttcgcctattcttattccataatccttattgaaattcaggacacagtcagatccccaccttcagagtccaagacaatgaagaaagcaactctgataagtgtggcagtaacaacccttttctacatgctatgtggttgctttggctatgctgcttttggagacatgtctcctggaaatctactaacagggtttggcttctacaacccatattggctacttgacattgctaatgttgcaatcgtagtccatcttgttggcgcgtaccaagtctattgccaacccttgtttgccttcgttgaaaaagcagctgcacaaagatatccagacagtggattcattactaaagatatcaaaatcccagttcctggtttccgcccctttaatcttaacctctttagatcggtatggaggacactttttgtggtcttcacaactgtgatttccatgctccttccgttctttaacgacatagttggtttgcttggagctttgggattttggccactcacggtttacttcccagtagaaatgtatatagcacaaaagaagatcccaaaatggagcacaagatggctctgcctgcaaatactaagcgctgcttgccttgttattacaatagctgctgctgctggatccattgctggggttgttggtgatctcaagtctgtcaagccattccagacctcttactga

SEQ ID NO: 571 - protein, 486 aa, Ricinus communis
MVENTAAKNHPHQVFDVSINMQTQVVGSKWLDDDGRTKRTGTVWTASAHIITAVIGSGVLSLAWAIAQLGWIAGPAVMFLFSLVTYYTSTLLSACYRSGDPVNGKRNYTYMDAVRTNLGGAKVKLCGFVQYLNLFGVAIGYTIASSISMMAIKRSNCFHKSGGKNPCHINANPYMIAFGIAEIIFSQIPDFDQLWWLSILAAVMSFTYSTIGLGLGIAQVVENGKAMGSVTGISIGANVTPTQKIWRSFQALGDIAFAYSYSIILIEIQDTVRSPPSESKTMKKATLISVAVTTLFYMLCGCFGYAAFGDMSPGNLLTGFGFYNPYWLLDIANVAIVVHLVGAYQVYCQPLFAFVEKAAAQRYPDSGFITKDIKIPVPGFRPFNLNLFRSVWRTLFVVFTTVISMLLPFFNDIVGLLGALGFWPLTVYFPVEMYIAQKKIPKWSTRWLCLQILSAACLVITIAAAAGSIAGVVGDLKSVKPFQTSY

SEQ ID NO: 572 - DNA, 1410 bp, Solanum tuberosum
  CDS (1)..(1410)
atggcacctgaatttcaaaagaacgctatgtacgtctcaaatgaactcgaaaatggagacgttcaaaaaaactttgatgatgatggacgtgaaaaaagaacagggactttgttgactgctagtgcacatattattactgctgtgattggttcaggagtactttcactagcatgggctatagctcaattaggatgggtggctggtcctgctgttctctttgccttttctttcatcacatatttcacttccacacttcttgccgactgttacaggtctccgggaccgatttccggcaagagaaactatacttatatggacgttgtccgctctcacttaggaggtgtgaaggtgacattgtgtggaattgcacaatatgctaaccttgttggagttacaattggatatacaattacagcatctattagtatggtggctgtaaagaggtcaaattgttttcacaaaaatgggcatgaagcaagttgctcaattgaaagttacccatacatgataatatttgcagtaattcaaatagttcttagccaaattccaaatttccacaagctctcatggttatcaattcttgctgctgttatgtcatttacttatgcttctattggtcttggactatccatagccaaagcctcaggtgtggggcaccatgtgaagacagccctaacaggggtggtagtaggtgtggatgtatctggaacagaaaaagtatggagaagtttccaagctattggagatattgcatttgcttatgcttattccacagttcttattgaaatacaggacacactgaaatcatcaccatcagaaagcaaggtaatgaagagagcctcactagctggagtttccaccacaactttattctatgtactttgtggtaccattggctatgcagcctttggaaacaatgctccaggaaattttcttactggatttggtttctatgaacctttttggctaattgactttgccaacgtctgcatcgctgtccaccttgtcggagcttatcaggttttctgccaaccattatatggattcgtggagggtcgttgcagcgaacgatggccagacagcaaattcataacctcagaatacgcgatgcaagttccatggtgtggcacttacaacctcaacttattcaggctggtgtggagaacaacatatgttatagtgacagcggtgattgcaatgatattccccttcttcaacgacttcttggggttgatcggagcagcatcgttctatccattaaccgtttacttcccaatagagatgtacattgctcagagaaagataccaaagtattctttcacatgggtatggctgaaaatattgagttggacttgtttgatcagtatcacttgttgcagctgctggatcgatccagggacttgccactga

SEQ ID NO: 573 - protein, 469 aa, Solanum tuberosum
MAPEFQKNAMYVSNELENGDVQKNFDDDGREKRTGTLLTASAHIITAVIGSGVLSLAWAIAQLGWVAGPAVLFAFSFITYFTSTLLADCYRSPGPISGKRNYTYMDVVRSHLGGVKVTLCGIAQYANLVGVTIGYTITASISMVAVKRSNCFHKNGHEASCSIESYPYMIIFAVIQIVLSQIPNFHKLSWLSILAAVMSFTYASIGLGLSIAKASGVGHHVKTALTGVVVGVDVSGTEKVWRSFQAIGDIAFAYAYSTVLIEIQDTLKSSPSESKVMKRASLAGVSTTTLFYVLCGTIGYAAFGNNAPGNFLTGFGFYEPFWLIDFANVCIAVHLVGAYQVFCQPLYGFVEGRCSERWPDSKFITSEYAMQVPWCGTYNLNLFRLVWRTTYVIVTAVIAMIFPFFNDFLGLIGAASFYPLTVYFPIEMYIAQRKIPKYSFTWVWLKILSWTCLISITCCSCWIDPGTCH

SEQ ID NO: 574 - DNA, 1452 bp, Medicago truncatula
  CDS (1)..(1452)
atggtagaacactcttccggaaccaaccttagctaccgtggagatattgttggcatggaggggggtacatctttacaagatgactccaaatactatgacgatgatggccgtgttaaacggacaggaaccatttggactacatgctcccacataataacagctgtgataggatctggggtgctctccttagcctggtctatagctcagatgggttgggttgctggtcctggagccatgatatttttcagcatcatcactctgtatacttcatcatttctcgctgattgttatcgttgtggtgacaccgaatttggaaagagaaactatactttcatggatgcagttagtaacattcttggcgggcccagtgttaagatttgtgggatagttcagtatttgaatcttttcggaagtgcaatagggtacaatattgcagctgccatgagcatgatggaaatcaaaaagtctttatgtgtccatacatctgatggaaaagacgcatgtcatatttcaggcaacccatacatgattgcttttggcgtggcacaacttttcctttctcaaattccagattttcataacatgtggtggctctcaatagttgctgcagtcatgtctttcttctactccacaattgctcttgctcttggaatttccaaagttgcagaaaacggtactgttatgggtagcctcacaggagtaagcgtcggaacagtgaccccggcccaaaaagtatggggggttttccaaggtcttggaaacatcgcctttgcttattcatattcttttgttctcctggaaattcaggacacaatcaaatctccaccatcagaaggaaaagcaatgaagatagctgcgaagataagtattgcagtaactacaacattttatttgctctgtggctgcatgggatatgctgcttttggagacaatgcgccaggcaacctgctcgccggatttggtgtctcaaaagcatattgggttgtagatgctgccaatgctgctatcgttattcacctttttggagcataccaagtgtatgcccaacccctatttgctttcgtcgagaaagaggcagcaaaaaaatggcccaaaattgacagagaattcaaagttaaaatccctggtttgccagtctacagtcaaaacatattttcgttagtttggaggacagtgtttgttatcatctccactctcatcgcaatgttgattccatttttcaacgacgttttgggagtgattggggcattgggattttggcctttaactgtttactttcctgtggagatgtatatcgtacaaatgaagatcccaaaatggagtaggaagtggattattctggaaataatgagtactttctgcctcattgtatctattgtggctggtcttggctcattggtcggtgtctggatcgacctgcagaaatacaaaccattcagcttatcgaattaa

SEQ ID NO: 575 - protein, 483 aa, Medicago truncatula
MVEHSSGTNLSYRGDIVGMEGGTSLQDDSKYYDDDGRVKRTGTIWTTCSHIITAVIGSGVLSLAWSIAQMGWVAGPGAMIFFSIITLYTSSFLADCYRCGDTEFGKRNYTFMDAVSNILGGPSVKICGIVQYLNLFGSAIGYNIAAAMSMMEIKKSLCVHTSDGKDACHISGNPYMIAFGVAQLFLSQIPDFHNMWWLSIVAAVMSFFYSTIALALGISKVAENGTVMGSLTGVSVGTVTPAQKVWGVFQGLGNIAFAYSYSFVLLEIQDTIKSPPSEGKAMKIAAKISIAVTTTFYLLCGCMGYAAFGDNAPGNLLAGFGVSKAYWVVDAANAAIVIHLFGAYQVYAQPLFAFVEKEAAKKWPKIDREFKVKIPGLPVYSQNIFSLVWRTVFVIISTLIAMLIPFFNDVLGVIGALGFWPLTVYFPVEMYIVQMKIPKWSRKWIILEIMSTFCLIVSIVAGLGSLVGVWIDLQKYKPFSLSN

SEQ ID NO: 576 - DNA, 1401 bp, Medicago truncatula
  CDS (1)..(1401)
atggaggtggaacactctatagaagctgttccttcacacaaagactccaaattgtacgatgatgatgaccgtctcaaaagaacaggaacggtttggacaacaagttcgcacataataacagcagttgtaggatcaggagtgttgtcgttagcatgggccatagctcagttgggttgggtaattggtccttctgttatgattttcttcagtctcatcacttggtatacttcatcacttctagctgaatgttatcgaattggtgatcctcattacggaaagaggaactatactttcatggaagctgttcacaccattctaggaggtttcaatgacaccctttgtgggatagttcagtacacaaatctttacggaactgcaataggatacacaattgcgggtgccattagcatgatggcaataaaaaggtctgactgtttgcattcctcaggaggaaaagactcatgtcacatttcaagcaatccatacatgatagcatttggagtaatccaaattttcttttctcaaattccagattttgataaaatgtggtggctctcaatagttgcagcaatcatgtctttcacctattcctttattggccttggactagcaattgccaaagttgcagaaaatggttccttcaagggtagcctcacaggagtaagcattggaactgtgacaaaagcccaaaaagtatggggaactttccaagctcttggcaacatagcctttgcatattcatattctcaaattctcattgaaattcaggacaccataaaaaatccaccatctgaagtaaaaacaatgaagcaagccacaaagataagtataggcgtgacaactgcattttatatgctttgtggctgcatgggttatgcagcatttggagacacagcaccagggaacttactcactggaatttttaatccatattggctcattgatattgctaatgctgctatcgtaattcaccttgtgggagcataccaagtatacgcgcaacccttctttgctttcgtcgagaaaattgtgataaaaagatggcctaaaataaacaaagaatacagaattccaattcctggttttcatccttacaatctaaatctattcagattaatatggaggactatatttgtgatcacaaccactgtgatagcaatgctgattcctttcttcaatgatgttttgggattacttggagcagtagggttttggcctttaacagtctattttccagtggagatgtatatcaaacaaaaaaagatcccaaaatggagttataaatggattagtatgcaaattttaagtgttgtatgtcttgtagtatcagttgtggctgttgttgggtcagtggcaagtattcagcttgatctgaagaaatacaaaccattcaccatgtaa

SEQ ID NO: 577 - protein, 466 aa, Medicago truncatula
MEVEHSIEAVPSHKDSKLYDDDDRLKRTGTVWTTSSHIITAVVGSGVLSLAWAIAQLGWVIGPSVMIFFSLITWYTSSLLAECYRIGDPHYGKRNYTFMEAVHTILGGFNDTLCGIVQYTNLYGTAIGYTIAGAISMMAIKRSDCLHSSGGKDSCHISSNPYMIAFGVIQIFFSQIPDFDKMWWLSIVAAIMSFTYSFIGLGLAIAKVAENGSFKGSLTGVSIGTVTKAQKVWGTFQALGNIAFAYSYSQILIEIQDTIKNPPSEVKTMKQATKISIGVTTAFYMLCGCMGYAAFGDTAPGNLLTGIFNPYWLIDIANAAIVIHLVGAYQVYAQPFFAFVEKIVIKRWPKINKEYRIPIPGFHPYNLNLFRLIWRTIFVITTTVIAMLIPFFNDVLGLLGAVGFWPLTVYFPVEMYIKQKKIPKWSYKWISMQILSVVCLVVSVVAVVGSVASIQLDLKKYKPFTM

SEQ ID NO: 578 - DNA, 1434 bp, Medicago truncatula
  CDS (1)..(1434)
atgttggaagaagaaattgtaagaaaccggagccattccatagatggtatcccttcacaacttgatcctgaatacttcgatgacgatggtcgtcctaaacgaacaggaacaatatggacaacaagctctcatataataacagctgtgattgggtctggggtgctatccttagcatgggctactgcacaattgggttggattggtggtcctttggcgatgattcttttcagcctcatcactttgtatacttcatcaatgctagctgaatgttatcgttgtggagatcctgtgtatggaaagagaagctatacttttgtggatgcagttcgtagcattcttggcgggcgccaatacacggtttgtggaatagttcagtacatgtatctttatggcagtgcaataggatactcgattgcagctcccatcagcatgatggaaataaaaaagtctagatgtctccatttatcaggaggaaaagatccatgtcacatttcaagcaacccatacatgatcggttttggagtaatcgaaattttcgtttctcaaattccagagtttcataatacgtggtggctctcagtaatagctgcaataatgtcttttggctattccacaattggcgtctttttagcaatttctcaaacagcagaaaatggtaccttcaagggtactctcactggaggaagcactgaaaatgtgtcaacaacaacagaagtgtggggaattttccaagctcttggtgacatagcctttgcttattcatactctcaaattctcattgaaattcaggacaccataaaaagtccaccatccgaaataaaaacgatgaagaatgcagcagctttaagtgttgctgtcactacagcattttatttgctttgtggctgcatgggctatgctgcattcggagaacaagcaccagggaacttgctcactggatttagtatgtacaatccagcctggctcatcgattttgcgaatgctgccgtcgtaatccaccttgtgggagcataccaagtatatgttcaacctgtctttgccttcgtagagaaaggagcagcaaaaagatggccccaaacaaaagtggaacacaaaattccaatcccgggttttcgtccttacaatctaaatctatttagattagtttggagaacagcatttatgatcctaactacttttgttgcaatgttgattcctttttttaatgatgttctgggatttcttggagcagtgggattttggcctttgacagtttattatccagtggagatgtatatcttgcaaaggaagatcccaaaatggagtcctaaatggattttgttgcaaatcataagtgttatatgctttattgtatcgggtgcggctgctcttggctcaaccgccagtattatagaggacctaaagcattacaagccattcagctcagagtattga

SEQ ID NO: 579 - protein, 477 aa, Medicago truncatula
MLEEEIVRNRSHSIDGIPSQLDPEYFDDDGRPKRTGTIWTTSSHIITAVIGSGVLSLAWATAQLGWIGGPLAMILFSLITLYTSSMLAECYRCGDPVYGKRSYTFVDAVRSILGGRQYTVCGIVQYMYLYGSAIGYSIAAPISMMEIKKSRCLHLSGGKDPCHISSNPYMIGFGVIEIFVSQIPEFHNTWWLSVIAAIMSFGYSTIGVFLAISQTAENGTFKGTLTGGSTENVSTTTEVWGIFQALGDIAFAYSYSQILIEIQDTIKSPPSEIKTMKNAAALSVAVTTAFYLLCGCMGYAAFGEQAPGNLLTGFSMYNPAWLIDFANAAVVIHLVGAYQVYVQPVFAFVEKGAAKRWPQTKVEHKIPIPGFRPYNLNLFRLVWRTAFMILTTFVAMLIPFFNDVLGFLGAVGFWPLTVYYPVEMYILQRKIPKWSPKWILLQIISVICFIVSGAAALGSTASIIEDLKHYKPFSSEY

SEQ ID NO: 580 - DNA, 1407 bp, Oryza sativa
  CDS (1)..(1407)
atggttcagatcgagccgctcgaggtgtcactggaggccggcaaccaggcggactcggcgttgctcgacgacgacgggcggccgcgccgcaccggcacgttctggacggcgagcgcgcacatcatcaccgccgtgatcgggtccggggtgctgtcgctgccgtgggcgacggcgcagctcgggtgggtcggcgggcccgccgtgatggtggtgttcggcggcgtcacctacttcaccgccacgctccaggccgagtgctaccgcaccggcgacgaggagaccggcgcccgcaactacacctacatcggcgccgtccgcgccatcctcggcggcgccaacgccaagctctgcggcatcatccagtacgccaacctcgtcggcaccgccgtcggctacaccatcgccgcctccatcagcatgcaggccatcaagagggcgggctgcttccacgccaatggccacaacgtcccgtgccacatctcgagcaccccgtacatgctcatcttcggcgccttcgagatcgtcttctcgcagatccccgacttccacgagatctggtggctgtccatcgtcgccgccgtcatgtccttcacctactccggcgtcggcctcggcctcggcatcgcccagaccgtcgccgacggcgggttccgcggcacgatcgccggcgtcaccaacgtcaccgccacgcagaaggcgtggcggtcgctgcaggcgctgggcaacatcgccttcgcgttcgccttctccaacgtgtacaccgagatccaggacacgatcaaggcgccgccgccgtcggaggcgaaggtgatgaagcaggcgtcgctgctgagcatcgtggcgacgtcggtgttctacgcgctgtgcgggtggatgggctacgcggcgttcggcaacgcggcgccggacaacctcctcaccggattcggcttcttcgagccgttctggctcgtcgacgccgccaacgtcgccatcgccgtgcacctcatcggcgcctaccaggtgtactgccagccggtcttcgccttcgtcgagcgcaaggcgtcgcgccggtggcccgacagcggcttcgtcaacagcgagctccgggtgtggcccttcgccatcagcgcgttccggctggcgtggcgctcggtgttcgtctgcttcaccaccgtggtcgccatggcgctgcccttcttcggcgtcatcgtcggcctcctcggtgccatctccttctggccgctcaccgtctacctccccacggagatgtacatcgcgcagcgcggcgtgcggcgcggcagcgcactgtggatcgggctcagggcgctcgccgtcgccggcttcgtcgtgtcggccgccgccaccacgggcgccgtcgccaacttcgtcggcgacttcatgaaattccgtcccttcagtggatag

SEQ ID NO: 581 - protein, 468 aa, Oryza sativa
MVQIEPLEVSLEAGNQADSALLDDDGRPRRTGTFWTASAHIITAVIGSGVLSLPWATAQLGWVGGPAVMVVFGGVTYFTATLQAECYRTGDEETGARNYTYIGAVRAILGGANAKLCGIIQYANLVGTAVGYTIAASISMQAIKRAGCFHANGHNVPCHISSTPYMLIFGAFEIVFSQIPDFHEIWWLSIVAAVMSFTYSGVGLGLGIAQTVADGGFRGTIAGVTNVTATQKAWRSLQALGNIAFAFAFSNVYTEIQDTIKAPPPSEAKVMKQASLLSIVATSVFYALCGWMGYAAFGNAAPDNLLTGFGFFEPFWLVDAANVAIAVHLIGAYQVYCQPVFAFVERKASRRWPDSGFVNSELRVWPFAISAFRLAWRSVFVCFTTVVAMALPFFGVIVGLLGAISFWPLTVYLPTEMYIAQRGVRRGSALWIGLRALAVAGFVVSAAATTGAVANFVGDFMKFRPFSG

SEQ ID NO: 582 - DNA, 1773 bp, Oryza sativa
  CDS (74)..(1501)
aaacactcgagctcacacttcctcaaatcctccaacacctcgatccattcgcagtagctgcgaggtgtctgacatggcgtcggggcagaaggtggtgaagccgatggaggtgtcggtggaggccgggaacgccggggaggcggcgtggctggacgacgacgggcgggcgcggcggacgggcacgttctggacggcgagcgcgcacatcatcaccgccgtcatcggctccggcgtgctgtcgctggcgtgggcgatcgcgcagctgggctgggtggccggccccgccgtgatgctcctcttcgccttcgtcatctactacacctccaccctcctcgccgagtgctaccgcaccggcgaccctgccaccggcaagcgcaactacacctacatggacgccgtgcgcgccaacctcggcggcgccaaggtcaccttctgcggcgtcatccagtacgccaacctcgtcggcgtcgccatcggctacaccatcgcgtcgtccatcagcatgcgcgccatcaggagggccggctgcttccaccacaacggccatggtgacccgtgccgcagctccagcaacccttacatgatcctcttcggcgccgtgcagatcgtcttctcgcagatccctgacttcgaccagatttggtggctgtccatcgtcgccgccgtcatgtccttcacctactccggcatcggcctctccctcggcatcgtccagacaatctccaatggcgggatccagggcagcctcaccggaatcagcatcggcgtcggcgtcagctcaacgcagaaggtgtggcgcagcctgcaggcattcggcgacatcgccttcgcatactccttctccaacatcctcatcgagatccaagacacgatcaaggcgccgccgccgtcggaggcgaaggtgatgaagagcgcgacgaggctgagcgtggcgacgaccacggtgttctacatgctgtgcgggtgcatgggctacgcggcgttcggcgacgcggcgcccgacaacctcctcaccggcttcgggttctacgagcccttctggctgctcgacgtcgccaacgtcgccatcgtcgtgcacctcgtcggcgcctaccaggtgttcgtccagccaatcttcgccttcgtcgagcgctgggcctcccgccggtggccggacagcgcgttcatcgccaaggagctccgcgtggggcccttcgcgctcagcctcttccgcctgacgtggcgctcggcgttcgtctgcctcaccaccgtcgtcgccatgctcctccccttcttcggcaacgtggtgggtctcctcggcgccgtctccttctggccgctcaccgtctacttccccgtcgagatgtacatcgcgcagcgcggcgtgccacgtggcagcgcgaggtgggtctcactcaagacgctcagcgcgtgctgcctcgtcgtctccatcgccgccgccgcgggctccattgctgacgtcatcgacgcgctcaaggtgtacaggccgttcagcggatgattcttctgattctctcttgctgctttgagcagagcatccactggtaaaaagtggacagtaattttctttttttacagtctatggacgtagtacagtaaaaaagtgtgtacaactgtacaagggagcagtagaatccttgcaggggtaaaatactgagatgtaactactgagcattttgtagcgctcaaacaggtacagaggggaaaaaattgaacccagattgtatggaggttggcgtaatataattgagccgcagccaaaaaatgaaattc

SEQ ID NO: 583 - protein, 475 aa, Oryza sativa
MASGQKVVKPMEVSVEAGNAGEAAWLDDDGRARRTGTFWTASAHIITAVIGSGVLSLAWAIAQLGWVAGPAVMLLFAFVIYYTSTLLAECYRTGDPATGKRNYTYMDAVRANLGGAKVTFCGVIQYANLVGVAIGYTIASSISMRAIRRAGCFHHNGHGDPCRSSSNPYMILFGAVQIVFSQIPDFDQIWWLSIVAAVMSFTYSGIGLSLGIVQTISNGGIQGSLTGISIGVGVSSTQKVWRSLQAFGDIAFAYSFSNILIEIQDTIKAPPPSEAKVMKSATRLSVATTTVFYMLCGCMGYAAFGDAAPDNLLTGFGFYEPFWLLDVANVAIVVHLVGAYQVFVQPIFAFVERWASRRWPDSAFIAKELRVGPFALSLFRLTWRSAFVCLTTVVAMLLPFFGNVVGLLGAVSFWPLTVYFPVEMYIAQRGVPRGSARWVSLKTLSACCLVVSIAAAAGSIADVIDALKVYRPFSG

SEQ ID NO: 584 - DNA, 1715 bp, Oryza sativa
  CDS (96)..(1523)
aaacactcgagctcacacctgctcgatcaaaatcctccaacaactcgatccattcgcagtagctgcgagctctgagcggcggcgaggtgtccgacatggcgtcggggcagaaggtggtgaagccgatggaggtgtcggtggaggccgggaacgccggggaggcggcgtggctggacgacgacgggcgggcgcggcggacgggcacgttctggacggcgagcgcgcacatcatcaccgccgtcatcggctccggcgtgctgtcgctggcgtgggcgatcgcgcagctgggctgggtggccggtcccgccgtgatgctcctcttcgccttcgtcatctactacacctccaccctcctcgccgagtgctaccgcaccggcgacccggccaccggcaagcgaaactacacctacatggacgccgtgcgcgccaacctcggcggcgccaaggtcaccttctgcggcgtcatccagtacgccaacctcgtcggcgtcgccatcggctacaccatcgcgtcgtccatcagcatgcgcgccatcaggagggccggctgcttccaccacaacggccatggtgacccgtgccgcagctccagcaacccttacatgatcctcttcggcgtcgtgcagatcgtcttctcgcagatcccggacttcgaccagatttggtggctgtccatcgtcgccgccgtcatgtccttcacctactccggcatcggcctctccctcggcatcgtccagacaatctccaatggcgggatccagggcagcctcaccggaatcagcatcggcgtcggcgtcagctcaacgcagaaggtgtggcgcagcctgcaggcattcggcgacatcgccttcgcatactccttctccaacatcctcatcgagatccaagacacgatcaaggcgccgccgccgtcggaggcgaaggtgatgaagagcgcgacgaggctgagcgtggcgacgaccacggtgttctacatgctgtgcgggtgcatgggctacgcggcgttcggcgacgcggcgcccgacaacctcctcacgggcttcggcttctacgagcccttctggctgctcgacgtcgccaacgtcgccatcgtcgtgcacctcgtcggcgcctaccaggtgttcgtccagccaatcttcgccttcgtcgagcgctgggcctcccgccggtggccggacagcgcgttcatcgccaaggagctccgcgtggggcccttcgcgctcagcctcttccgcctgacgtggcgctcggcgttcgtctgcctcaccacagtcgtcgccatgctcctccccttcttcggcaacgtggtgggtctcctcggcgccgtctccttctggccgctcaccgtctacttccccgtcgagatgtacatcgcgcagcgcggcgtgccacgtggcagcgcgaggtgggtctcgctcaagacgctcagcgcgtgctgcctcgtcgtctccatcgccgccgctgcgggctccattgctgacgtcatcgacgctctcaaggtgtacagaccgttcagcggatgattggaacgtgaggggcacgtgtgctcgttaaattatttcttactatctctgtaccaaaatatagcaaactagtataaataggacgaaattcgggtagttctcaggtacgaattcatcgtactaggaaatatctcacattgtattaagttgctatattttgggtcagcattagtacaatattacacaaagagg

SEQ ID NO: 585 - protein, 475 aa, Oryza sativa
MASGQKVVKPMEVSVEAGNAGEAAWLDDDGRARRTGTFWTASAHIITAVIGSGVLSLAWAIAQLGWVAGPAVMLLFAFVIYYTSTLLAECYRTGDPATGKRNYTYMDAVRANLGGAKVTFCGVIQYANLVGVAIGYTIASSISMRAIRRAGCFHHNGHGDPCRSSSNPYMILFGVVQIVFSQIPDFDQIWWLSIVAAVMSFTYSGIGLSLGIVQTISNGGIQGSLTGISIGVGVSSTQKVWRSLQAFGDIAFAYSFSNILIEIQDTIKAPPPSEAKVMKSATRLSVATTTVFYMLCGCMGYAAFGDAAPDNLLTGFGFYEPFWLLDVANVAIVVHLVGAYQVFVQPIFAFVERWASRRWPDSAFIAKELRVGPFALSLFRLTWRSAFVCLTTVVAMLLPFFGNVVGLLGAVSFWPLTVYFPVEMYIAQRGVPRGSARWVSLKTLSACCLVVSIAAAAGSIADVIDALKVYRPFSG

SEQ ID NO: 586 - DNA, 1401 bp, Arabidopsis thaliana
  CDS (1)..(1401)
atggatgttccacggccagctttcaaatgttttgatgacgatggccggcttaaacgttcagggacggtttggaccgcgagtgcgcatatcataaccgccgtgattggatctggtgttctatcgcttgcgtgggctataggtcaactcggttggatcgcaggtcctacagtgatgttgttgttctcttttgtcacttactactcttccacgcttcttagcgactgctacagaaccggagatcctgtctctgggaagagaaactatacttacatggacgctgtccgatcaatcctaggtggctttaggttcaagatttgtgggctgattcagtatttgaatctgtttggtatcacggtcgggtacacaatcgcagcatctataagtatgatggcgatcaagaggtccaactgtttccacgagagcggagggaaaaacccgtgtcacatgtcgagcaatccatacatgatcatgtttggtgtgaccgagatcttgctctctcagatcaaagattttgaccagatttggtggctctccattgtcgctgctatcatgtccttcacatactctgcaatcggtttagctctcggaatcattcaagtcgcggcaaatggagttgtcaagggaagtctcaccggaattagcatcggcgcagtgactcagacccaaaaaatatggagaacctttcaagcacttggagacattgcctttgcttattcatactctgttgttcttattgaaattcaggacactgtaagatctccaccagcagaatcaaaaacgatgaagatcgccacaagaatcagcatcgctgttacaacgacattttacatgctatgtggttgtatgggctatgcggccttcggagataaagcaccgggaaacctcttaaccggttttggtttctacaatccgttttggctccttgacgtggctaacgctgccatagttatccaccttgtaggagcttatcaagtctttgctcagcccatcttcgcctttattgagaaacaactggccgctaggtttcccgacagtgacttggtgaccaaggaatacgaaatccgaatccctggttttaggtcaccgtacaaagtcaacgttttcagagcagtttaccgaagcgggtttgtggttttgaccactgtgatatccatgcttatgccgtttttcaacgacgtcgtagggattttaggtgcgttagggttttggcctttgacggtttactttccggtggagatgtatataagacagaggaaggttgagagatggagtatgaagtgggtttgtctgcagatgttgagctgtggttgtttgatgatcacgttggtcgccggagttggctccatcgccggagtaatgctagaccttaaggtttacaagccgttcaagactacttactaa

SEQ ID NO: 587 - protein, 466 aa, Arabidopsis thaliana
MDVPRPAFKCFDDDGRLKRSGTVWTASAHIITAVIGSGVLSLAWAIGQLGWIAGPTVMLLFSFVTYYSSTLLSDCYRTGDPVSGKRNYTYMDAVRSILGGFRFKICGLIQYLNLFGITVGYTIAASISMMAIKRSNCFHESGGKNPCHMSSNPYMIMFGVTEILLSQIKDFDQIWWLSIVAAIMSFTYSAIGLALGIIQVAANGVVKGSLTGISIGAVTQTQKIWRTFQALGDIAFAYSYSVVLIEIQDTVRSPPAESKTMKIATRISIAVTTTFYMLCGCMGYAAFGDKAPGNLLTGFGFYNPFWLLDVANAAIVIHLVGAYQVFAQPIFAFIEKQLAARFPDSDLVTKEYEIRIPGFRSPYKVNVFRAVYRSGFVVLTTVISMLMPFFNDVVGILGALGFWPLTVYFPVEMYIRQRKVERWSMKWVCLQMLSCGCLMITLVAGVGSIAGVMLDLKVYKPFKTTY

SEQ ID NO: 588 - DNA, 1443 bp, Arabidopsis thaliana
  CDS (1)..(1443)
atggtcgttcagaatgttcaagatttggatgttcttccgaaacatagctccgattcattcgatgatgatggtcgtcccaagcgaaccgggacggtgtggacagcaagtgcacacataataacagcagtaattgggtcaggagtgttgtcattggcatgggccgttgctcagattggttggattggtggtccagtggctatgttactcttttctttcgttactttttacacatctacccttctctgttcttgttaccgatctggtgactctgttaccggcaaaagaaactacacttacatggacgctattcactccaacctcggtgggattaaggtgaaagtatgtggagttgtgcaatatgttaatctatttggtacagcaattggatatacaattgcatcagctataagtttggtagcaatccaaaggacaagttgccaacagatgaatggaccaaatgatccttgtcatgttaatggaaatgtttacatgattgcgtttggtattgtacaaatcatattctctcagattcctgattttgatcagttatggtggctttccattgtcgctgcggtcatgtcttttgcttattctgccattggacttggccttggtgtctctaaagtggtagagaacaaagaaattaaaggtagtctcactggagtcactgttgggacagtgacactgagtgggacagtgacatcgtcgcagaaaatatggagaacatttcagtctcttggcaacattgcgtttgcgtactcttactcgatgattctcatcgaaattcaggacacggtgaaatcaccgcctgccgaagtaaacacgatgagaaaagcgacttttgtaagtgtggcagtgactacagtcttctacatgctatgtggctgtgtagggtatgcagcatttggggataacgcacccggaaatctcctcgctcatggagggtttagaaacccatattggttgcttgacattgctaatctcgctatagtgatccatctagtcggtgcttaccaagtctattgccaacccctctttgccttcgtcgagaaggaagcctctaggaggtttccagagagcgaattcgtcacaaaagagatcaagatccaactcttcccggggaagccctttaacttgaatctcttcaggctcgtatggaggacgttcttcgtgataacaacaacgttgatctcaatgttaatgcctttctttaacgatgtagtcggtctcttgggggccatcggtttttggcctttaacggtttatttcccagtggaaatgtacattgcacagaagaatgttccgagatggggcacaaagtgggtttgtctacaagtcttgagtgtgacatgtctttttgtgtccgtagccgcggccgcgggatctgttattggcattgttagtgatctcaaggtctacaaacctttccagtctgaattctga

SEQ ID NO: 589 - protein, 480 aa, Arabidopsis thaliana
MVVQNVQDLDVLPKHSSDSFDDDGRPKRTGTVWTASAHIITAVIGSGVLSLAWAVAQIGWIGGPVAMLLFSFVTFYTSTLLCSCYRSGDSVTGKRNYTYMDAIHSNLGGIKVKVCGVVQYVNLFGTAIGYTIASAISLVAIQRTSCQQMNGPNDPCHVNGNVYMIAFGIVQIIFSQIPDFDQLWWLSIVAAVMSFAYSAIGLGLGVSKVVENKEIKGSLTGVTVGTVTLSGTVTSSQKIWRTFQSLGNIAFAYSYSMILIEIQDTVKSPPAEVNTMRKATFVSVAVTTVFYMLCGCVGYAAFGDNAPGNLLAHGGFRNPYWLLDIANLAIVIHLVGAYQVYCQPLFAFVEKEASRRFPESEFVTKEIKIQLFPGKPFNLNLFRLVWRTFFVITTTLISMLMPFFNDVVGLLGAIGFWPLTVYFPVEMYIAQKNVPRWGTKWVCLQVLSVTCLFVSVAAAAGSVIGIVSDLKVYKPFQSEF

SEQ ID NO: 590 - DNA, 1431 bp, Oryza sativa
  CDS (1)..(1431)
atggggaaggcggcggcgatggaggtgtcggcgtcggcggcggcggaggcggggatgatggtgggtcatggggagtggcgcgacgacgacgggcgggcgcggcggatggggacggtgtggacggcgagcgcgcacatcatcacggcggtgatcggctccggcgtgctgtcgctggcgtgggcgatcgcgcagctcggctgggtggccggccccgccgtcatgctgctcttcgccttcgtcatctactacacctccacgctgctcgccgagtgctaccgctccggcgacccgtgcaccggcaagcgcaactacacctacatggacgccgtccgcgccaacctcggcggctccaaggtccgcctctgcggcgtcatccagtacgccaacctcttcggtgtcgccatcggctacaccatcgccgcctccatcagcatgctggcgatcaagagggcggattgcttccacgagaaggggcacaagaacccgtgcaggagctcgagcaacccgtacatgatcctgttcggcgtcgtgcagatcgtgttctcacagatcccggatttcgatcagatatggtggctgtccatcgtcgccgccatcatgtccttcacctattcgacgattggcctctcgctcggcatcgcgcagaccgtcgccaacggcgggttcatgggcagcctcaccggcattagcgtcggcaccggcgtcacctccatgcagaaggtctggcgcagcctccaggccttcggtgacatcgcgttcgcctactcctactccatcatcctcatcgagatccaggacacgatcaaggcgccgccgccatcggaggcgaaggtgatgaagcgcgcgacgatggtgagcgtggcgacgacgacggtgttctacatgctgtgcgggtgcatggggtacgcggcgttcggggacaagtcgccggacaacctgctcaccgggttcggcttctacgagccgttctggctgctcgacgtcgccaacgctgccatcgtcgtgcacctcgtcggcgcctaccaggtgttcgtccagccgatcttcgcgttcgtcgagcggtgggcggcggcgaggtggccggacggcggcttcatctcccgggagctccgcgtgggccccttctcgctcagcgtgttccgcctgacatggcgcacggcgttcgtctgcgccaccaccgtcgtgtccatgctcctcccgttcttcggcgacgtggtggggctcctcggcgccgtctcgttctggccgctcaccgtctacttccccgtcgagatgtacatcgcgcagcgcggcgtgcggcgagggagcgcgcggtggctctgcctcaaggtcctcagcgccgcctgcctcgtcgtctccgtcgccgccgccgccggctccatcgccgacgtggtcgacgcgctcaaggtgtaccggccgttcagcgggtag

SEQ ID NO: 591 - protein, 476 aa, Oryza sativa
MGKAAAMEVSASAAAEAGMMVGHGEWRDDDGRARRMGTVWTASAHIITAVIGSGVLSLAWAIAQLGWVAGPAVMLLFAFVIYYTSTLLAECYRSGDPCTGKRNYTYMDAVRANLGGSKVRLCGVIQYANLFGVAIGYTIAASISMLAIKRADCFHEKGHKNPCRSSSNPYMILFGVVQIVFSQIPDFDQIWWLSIVAAIMSFTYSTIGLSLGIAQTVANGGFMGSLTGISVGTGVTSMQKVWRSLQAFGDIAFAYSYSIILIEIQDTIKAPPPSEAKVMKRATMVSVATTTVFYMLCGCMGYAAFGDKSPDNLLTGFGFYEPFWLLDVANAAIVVHLVGAYQVFVQPIFAFVERWAAARWPDGGFISRELRVGPFSLSVFRLTWRTAFVCATTVVSMLLPFFGDVVGLLGAVSFWPLTVYFPVEMYIAQRGVRRGSARWLCLKVLSAACLVVSVAAAAGSIADVVDALKVYRPFSG

SEQ ID NO: 592 - DNA, 1449 bp, Pisum sativum
  CDS (1)..(1449)
atggttgttgagaagaatgctagcaagaatcatcatcaccaaacatttgatgtatccattgatcaacaactcgattctaagtttttcgatgatgacggtcgcgtcaaacgaaccggcacatcttggactgcaagtgcccatgtaataacagcagtaattggctctggagtgctgtctctagcttgggctatagctcagctgggatggattgctggtcctgttgtcatgatcctctttgcttgggttacttattacacctcggttcttctcgctgaatgttatcgtaatggtgatccagtaaatggcaagagaaactacacttacatggaagttgttcattcgaatcttggtggtttacaagtccagttttgtgggttcattcagtatctcaaccttattggggtcgcgattggatacacggtagcttctgccataagcatgatggcgattgaaaggtcaaattgttatcataggagtggaggaaaagatccatgtcatatgaacagcaacgcttacatgattgcttttggtgctgtgcaaattatagtctctcaaattccagattttgatcagttatggtggctttccattgttgctgctgttatgtcctttacatattcgacgattggtctaggccttggtatcggaaaagttatggagaacaaaaagtttgctggaaccattactggagtaaatgatgtgacaaaagctcagaaaacttgggggagtttgcaagctcttggtgacatagcttttgcttattcattctccatgattcttatagaaattcaggacacggtaaaagcaccaccaccgtcagagtcgaaaaccatgaagaaggctacattgatcagtgttatagtgacaacatttttctacatgctttgcggttgtttaggatacgcagcgtttggaaattcaagtcccggaaaccttttaaccggtttcggattctataacccattttggctccttgacatagccaatgctgccatagtgattcaccttattggtgcataccaagtctattgccaacccctttatgctttcgtcgaaaactacatggtgaaaagatttccagacaattattttttgaacaagaacataaagattccaatcccgggtttagatatgtataaactcaaccttttcaaattggtttggaggacagtttttgtaatattaacaactttggtctcaatgcttcttccattcttcaatgatattgttggacttcttggtgcacttggattttggcctctaacggtttattttccggtggagatgtatataattcaaaagaaaataccaaagtggagcacaaaatggacatgccttcaattgcttagtggtgcttgtcttataatcactatagcagcttcagttggttctattgctgggatttatcttgatcttaaagtgtttaagccattcaagactatctattga

SEQ ID NO: 593 - protein, 482 aa, Pisum sativum
MVVEKNASKNHHHQTFDVSIDQQLDSKFFDDDGRVKRTGTSWTASAHVITAVIGSGVLSLAWAIAQLGWIAGPVVMILFAWVTYYTSVLLAECYRNGDPVNGKRNYTYMEVVHSNLGGLQVQFCGFIQYLNLIGVAIGYTVASAISMMAIERSNCYHRSGGKDPCHMNSNAYMIAFGAVQIIVSQIPDFDQLWWLSIVAAVMSFTYSTIGLGLGIGKVMENKKFAGTITGVNDVTKAQKTWGSLQALGDIAFAYSFSMILIEIQDTVKAPPPSESKTMKKATLISVIVTTFFYMLCGCLGYAAFGNSSPGNLLTGFGFYNPFWLLDIANAAIVIHLIGAYQVYCQPLYAFVENYMVKRFPDNYFLNKNIKIPIPGLDMYKLNLFKLVWRTVFVILTTLVSMLLPFFNDIVGLLGALGFWPLTVYFPVEMYIIQKKIPKWSTKWTCLQLLSGACLIITIAASVGSIAGIYLDLKVFKPFKTIY

SEQ ID NO: 594 - DNA, 1401 bp, Oryza sativa
  CDS (1)..(1401)
atggacgtggagaaggtggagaggaaggaggtggccgtcgacgacgatggccgcgtcagaacaggaacggtatggacggcgacgacgcacgccatcaccgccgtgatcgggtcaggcgtgctggcgctgccgtggagcgtggcccagatggggtgggtgctcggccccatcgccctcgtcgtctgcgcctacatcacctactacaccgccgtcctcctctgcgactgctaccgcacgccggaccccgtccacggcaagcggaactacacctacatggacgtcgtccgctcatgcctcgggcctcgagacgtggtcgtgtgtggcattgcgcagtacgcgattctctggggcgcaatggtgggttacaccatcacgaccgctacgagcatcatgtcagtggtgcgcacgaactgccaccactacaaggggccggacgcgacctgcggctcgtccgggacgatgtacatggtgctgttcggcctcgcggaggtcgtcctgtcccagtgcccgagcctggagggggtgacgctcatctccgtcgtcgccgccgtcatgtcgttcacctactccttcgtcgggctcttcctcagcgccgctaaggtcgcgtcgcacggcgcggcgcacggcaccctcctcggcgtcagggtcggcgccggaggcgtcaccgcgtcgaccaaggcgtggcacttcctgcaggcgctcgggaacatcgccttcgcgtacacctactccatgctgctcatcgagatccaggacacggtgaagtcgccgccgtcggagaacgtgacgatgaagagggcgagcctgtacggcatcggcgtcacgaccgtcttctacgtgtcgatcgggtgcgtcgggtacgcggcgttcggcaacgccgcgcccgggaacgtcctcaccggcttcctcgagccgttctggctcgtcgacatcgccaacgttgccgtcgtcatccacctggtcggagcgtaccaggtgtacgcgcagccggtgttcgcgtgctacgagaagtggctggcgagccgttggccggagtcggcgttcttccaccgggagtacgcggtgccgctgggcggcgggcgcgcggtgcggttcacgctgtgcaagctggtgctgcgcacggcgttcgtggccgtgacgacggtggtgtcgctggtgctgccgttcttcaacgccgtgctcgggctgctcggcgccgtcgcgttctggccgctcacggtgtacttcccggtgaccatgtacatggcgcaggcgaaggtgcagagaggcagccggaagtgggtggcgctgcaggcgctcaacgtcggcgcgctcgtcgtgtcgctgctcgcggcggtgggctcggtggccgacatggcgcagcgcctgcgccacgtcaccatcttccaaacgcagctctga

SEQ ID NO: 595 - protein, 466 aa, Oryza sativa
MDVEKVERKEVAVDDDGRVRTGTVWTATTHAITAVIGSGVLALPWSVAQMGWVLGPIALVVCAYITYYTAVLLCDCYRTPDPVHGKRNYTYMDVVRSCLGPRDVVVCGIAQYAILWGAMVGYTITTATSIMSVVRTNCHHYKGPDATCGSSGTMYMVLFGLAEVVLSQCPSLEGVTLISVVAAVMSFTYSFVGLFLSAAKVASHGAAHGTLLGVRVGAGGVTASTKAWHFLQALGNIAFAYTYSMLLIEIQDTVKSPPSENVTMKRASLYGIGVTTVFYVSIGCVGYAAFGNAAPGNVLTGFLEPFWLVDIANVAVVIHLVGAYQVYAQPVFACYEKWLASRWPESAFFHREYAVPLGGGRAVRFTLCKLVLRTAFVAVTTVVSLVLPFFNAVLGLLGAVAFWPLTVYFPVTMYMAQAKVQRGSRKWVALQALNVGALVVSLLAAVGSVADMAQRLRHVTIFQTQL

SEQ ID NO: 596 - DNA, 1380 bp, Oryza sativa
  CDS (1)..(1380)
atggacgtctaccttccccggacccaaggcgacgtcgacgacgacggcaaggagaggaggacagggacggtgtggacggcgacggcgcacataatcacggcggtgatcgggtccggcgtgctgtcgctggcgtgggcgatggcgcagctggggtgggtggctggccccatcaccctcctcctcttcgccgccatcaccttctacacctgcggcctcctctccgactgctaccgcgtcggcgacccggccaccggcaagcgcaactacacctacaccgacgccgtcaagtcctacctcggtggctggcacgtctggttctgcggcttctgccagtacgtcaacatgttcggcaccggcatcggctacaccatcaccgcctccatctccgccgcggctatcaacaagtccaactgctaccactggcgcggccatggcacggactgcagccagaacacgagcgcctacatcatcggcttcggcgtcctgcaggccctcttctgccagctcccaaacttccaccagctctggtggctgtccatcatcgccgccgtcatgtccttctcgtacgccgccatcgccgtcggcttgtcgctggcgcagaccatcatggacccgctggggaggacgacgctgacgggcacggtggtcggcgtcgacgtcgacgccacgcagaaggtgtggctcacgttccaggcgctggggaacgtcgccttcgcctactcctacgccatcatcctcatcgagatccaggacacgctgcggtcgccgccgccggagaacgcgacgatgcggcgcgccacggcggcggggatctcgacgaccacggggttctacctgctgtgcggctgcctgggctactcggcgttcgggaacgcggcgccgggcaacatcctcaccggcttcggcttctacgagccatactggctggtggacgtggccaacgcctgcatcgtggtgcacctcgtcggcgggttccaggtgttctgccagccgctgttcgccgccgtggagggcggcgtggcgcggcggtgcccggggctgctcggcggcggcgcggggcgggccagcggcgtgaacgtgttccggcttgtgtggaggacggcgttcgtggcggtgatcacgctgctggccatcctgatgcccttcttcaacagcatcctgggaatcctggggagcatcgcgttctggccgctcaccgtcttcttccccgtcgagatgtacatccggcagcggcagctgccgcggttcagcgccaagtgggtggcgctgcagagcctgagcctcgtctgcttcctcgtcaccgtcgccgcctgcgccgcctccatccagggcgtcctcgactcgctcaagacctacgtgcccttcaagaccaggtcctga

SEQ ID NO: 597 - protein, 459 aa, Oryza sativa
MDVYLPRTQGDVDDDGKERRTGTVWTATAHIITAVIGSGVLSLAWAMAQLGWVAGPITLLLFAAITFYTCGLLSDCYRVGDPATGKRNYTYTDAVKSYLGGWHVWFCGFCQYVNMFGTGIGYTITASISAAAINKSNCYHWRGHGTDCSQNTSAYIIGFGVLQALFCQLPNFHQLWWLSIIAAVMSFSYAAIAVGLSLAQTIMDPLGRTTLTGTVVGVDVDATQKVWLTFQALGNVAFAYSYAIILIEIQDTLRSPPPENATMRRATAAGISTTTGFYLLCGCLGYSAFGNAAPGNILTGFGFYEPYWLVDVANACIVVHLVGGFQVFCQPLFAAVEGGVARRCPGLLGGGAGRASGVNVFRLVWRTAFVAVITLLAILMPFFNSILGILGSIAFWPLTVFFPVEMYIRQRQLPRFSAKWVALQSLSLVCFLVTVAACAASIQGVLDSLKTYVPFKTRS

SEQ ID NO: 598 - DNA, 1464 bp, Oryza sativa
  CDS (1)..(1464)
atggcgaaggacgtggagatggcggtgcggaacggagacggcggcggcggcggcggctactacgccacccacccgcacggcggcgccggcggcgaggacgtcgacgacgacggcaagcagcggcgaaccggtaacgtatggacggcgagcgcgcacatcatcacggcggtgatcggctccggcgtgctctctctcgcatgggcaacggcgcagctcggctgggtggtcgggccggtgactctgatgctcttcgccctcatcacgtactacacctctgggctcctcgccgactgctaccgcactggcgatccggtcagcggcaagcgcaactacacctacatggatgccgttgcggcctacttaggtggctggcaagtctggtcctgtggtgttttccaatatgtcaacctggttgggacagcaattgggtacacaatcacagcatccatcagcgcagcggctgtgcacaaggccaactgctaccacaagaacggccacgatgccgattgcggtgtctacgacaccacgtacatgatcgtctttggagtcgtccagatcttcttctccatgctgcccaacttcagtgacctctcatggctttccatcctcgccgcggtcatgtcattctcatactcgaccattgccgttggcctctcgcttgcgcgaacaatatcaggtgctactggtaagactactctgactggcgttgaggttggagttgacgtcacttcagcccagaagatctggctcgcgttccaagcgctcggtgacatcgcgttcgcctactcctactccatgatccttatagaaattcaggacacggtgaagtctccaccggcggagaacaagacgatgaagaaggcaacgctgctgggggtgtcgaccacgacggcgttctacatgctgtgcgggtgcctggggtacgcggcgttcgggaacgcggcgccggggaacatgctcaccgggttcggcttctacgagccctactggctgatcgacttcgccaacgtctgcatcgtggtccacctggtcggcgcctaccaggtgttctgccagcccatcttcgccgccgtcgagacgttcgccgccaggcggtggccgggctcggagttcatcacccgggagcgccccgtcgtggccggcaggtcgttcagcgtcaacatgttcaggctgacgtggcggacggcgttcgtggtcgtcagcacggtgctcgccatcgtgatgcccttcttcaacgacatcctgggcttcctcggcgccgtcgggttctggccgctgacggtgtactacccggtggagatgtacatccggcagcggcggatacagcggtacacgtccaggtgggtggcgctgcagacgctcagcctcctctgcttcctcgtctcgctcgcctccgccgtcgcctccatcgagggcgtcagcgagtcgctcaagcactacgtccccttcaagaccaagtcgtga

SEQ ID NO: 599 - protein, 487 aa, Oryza sativa
MAKDVEMAVRNGDGGGGGGYYATHPHGGAGGEDVDDDGKQRRTGNVWTASAHIITAVIGSGVLSLAWATAQLGWVVGPVTLMLFALITYYTSGLLADCYRTGDPVSGKRNYTYMDAVAAYLGGWQVWSCGVFQYVNLVGTAIGYTITASISAAAVHKANCYHKNGHDADCGVYDTTYMIVFGVVQIFFSMLPNFSDLSWLSILAAVMSFSYSTIAVGLSLARTISGATGKTTLTGVEVGVDVTSAQKIWLAFQALGDIAFAYSYSMILIEIQDTVKSPPAENKTMKKATLLGVSTTTAFYMLCGCLGYAAFGNAAPGNMLTGFGFYEPYWLIDFANVCIVVHLVGAYQVFCQPIFAAVETFAARRWPGSEFITRERPVVAGRSFSVNMFRLTWRTAFVVVSTVLAIVMPFFNDILGFLGAVGFWPLTVYYPVEMYIRQRRIQRYTSRWVALQTLSLLCFLVSLASAVASIEGVSESLKHYVPFKTKS

SEQ ID NO: 600 - DNA, 1491 bp, Oryza sativa
  CDS (1)..(1491)
atgggggagaacggtgtggtggcgagcaagctgtgctacccggcggcggccatggaggtggtcgccgccgagctcggccacacggccggctccaagctgtacgacgacgacggccgcctcaagcgcaccgggacgatgtggacggcgagcgcgcacatcatcacggcggtgatcggctccggcgtgctgtcgctggggtgggcgatcgcgcagctgggttgggtggccggccccgccgtcatgctgctcttctcgttcgtcacctactacacctccgcgctgctcgccgactgctaccgctccggcgacgagagcaccggcaagcgcaactacacctacatggacgccgtgaacgccaacctgagtggcatcaaggtccaggtctgcgggttcctgcagtacgccaacatcgtcggcgtcgccatcggctacaccattgccgcctccattagcatgctggcgatcaagcgggcgaactgcttccacgtcgaggggcacggcgacccgtgcaacatctcgagcacgccgtacatgatcatcttcggcgtggcggagatcttcttctcgcagatcccggacttcgaccagatctcgtggctgtccatcctcgccgccgtcatgtcgttcacctactccaccatcgggctcggcctcggcgtcgtgcaggtggtggccaacggcggcgtcaaggggagcctcaccgggatcagcatcggcgtggtgacgcccatggacaaggtgtggcggagcctgcaggcgttcggcgacatcgccttcgcctactcctactccctcatcctcatcgagatccaggacaccatccgggcgccgccgccgtcggagtcgagggtgatgcggcgcgccaccgtggtgagcgtcgccgtcaccacgctcttctacatgctctgcggctgcacggggtacgcggcgttcggcgacgccgcgccgggcaacctcctcaccgggttcggcttctacgagcccttctggctcctcgacgttgccaacgccgccatcgtcgtccacctcgtcggcgcctaccaggtctactgccagccgctgttcgccttcgtcgagaagtgggcgcagcagcggtggccgaaatcatggtacatcaccaaggatatcgacgtgccgctctccctctccggcggcggcggcggcggcggaaggtgctacaagctgaacctgttcaggctgacatggaggtcggcgttcgtggtggcgacgacggtggtgtcgatgctgctgccgttcttcaacgacgtggtggggttcctcggcgcggtggggttctggccgctcaccgtctacttcccggtggagatgtacatcgtgcagaagaggataccgaggtggagcacgcggtgggtgtgcctgcagctgctcagcctcgcctgcctcgccatcaccgtcgcctccgccgccggctccatcgccggaatcctctccgacctcaaggtctacaagccgttcgccaccacctactaa

SEQ ID NO: 601 - protein, 496 aa, Oryza sativa
MGENGVVASKLCYPAAAMEVVAAELGHTAGSKLYDDDGRLKRTGTMWTASAHIITAVIGSGVLSLGWAIAQLGWVAGPAVMLLFSFVTYYTSALLADCYRSGDESTGKRNYTYMDAVNANLSGIKVQVCGFLQYANIVGVAIGYTIAASISMLAIKRANCFHVEGHGDPCNISSTPYMIIFGVAEIFFSQIPDFDQISWLSILAAVMSFTYSTIGLGLGVVQVVANGGVKGSLTGISIGVVTPMDKVWRSLQAFGDIAFAYSYSLILIEIQDTIRAPPPSESRVMRRATVVSVAVTTLFYMLCGCTGYAAFGDAAPGNLLTGFGFYEPFWLLDVANAAIVVHLVGAYQVYCQPLFAFVEKWAQQRWPKSWYITKDIDVPLSLSGGGGGGGRCYKLNLFRLTWRSAFVVATTVVSMLLPFFNDVVGFLGAVGFWPLTVYFPVEMYIVQKRIPRWSTRWVCLQLLSLACLAITVASAAGSIAGILSDLKVYKPFATTY

SEQ ID NO: 602 - DNA, 1455 bp, Oryza sativa
  CDS (1)..(1455)
atggcgtcggtcgacttggagctggggcgacctctgtcggcggcggcggcggcgtaccctcctccgctgcggcggagcatcaacgacgacgacgttgacgacgacgggaagcccaagcgaacaggaacggagtggacggcgagcgcgcacatcgtcacggcggtggtcggctccggcgtgctgtcgctggcatggtccacggcgcagctcggctgggtcgccggcccggccaccctcgtcgtgttcgcggtcatcacctactacacctccgtgctcctcgccgactgctaccgcgccggcggcgatcaggtctccgggaagaggaactacacatacatggacgccgtcgagtcctatctaggtggtcggcaagtgtggttctgtggtctctgtcagtacgttaacctggttggaactgcaatcgggtacaccatcacagcatccatcagtgccgcggcggtgtacaagtccaactgcttccacaagaacggccactccgccgactgcagcgtcttcaccacctcgtacatggtggtgttcggcgttgtccaggtcttcttctcccagctgcagagcctccacgaggtggcgtggctgtccgtgctcgccgccgtcatgtccttctcctactcggccatcgccgtcggcctctccttggcacaaaccatatcaggtcctactggtatgacgactatgtctgggactgtaatcggaatagatgttgatttgtcgcacaagatatggcaggcactgcaagccctcggaaacatcgcgttcgcatattcctactccctggttctcattgaaatccaggacacgatcaggtcgccgccggcggagagcaagacgatgaggaaggcgaacgcgctggccatgccggtgatcacggcgttctacacgctctgcggctgcctcggctacgcggcgttcgggaacgcggcgccggggaacatgctcacgggcttcggcttctacgacccctactggctcgtcggcctcgccaacgcctgcatcgtcgtgcacctcgtcggcgcctaccaggtgatgtcccagcccgtcttcaccgccgtcgagtcctgggcgtcctcccggtggccccggtgcggcttcttcgtcaccggcggcggcggaacgaggctgatcagcgtgaacgcgttcaggctcgcgtggcgcacggcgtacgtcgtggcgtgcaccgcggtcgccgccgtggtgccgttcttcaacgacgtgctcggcctcctcggcgccgtcgggttctggccgctcaccgtgtacttccccgtggagatgtacatccggcggcggaagctggagaggtcgtccaagaggtgggtggcgctgcagagcctcaacgccgtgtgcttcgtggtgacgctcgcctcagcggtcgcgtccgtgcaggggatcgccgaatcgatggcgcactatgtaccgttcaagtcaaagttgtaa

SEQ ID NO: 603 - protein, 484 aa, Oryza sativa
MASVDLELGRPLSAAAAAYPPPLRRSINDDDVDDDGKPKRTGTEWTASAHIVTAVVGSGVLSLAWSTAQLGWVAGPATLVVFAVITYYTSVLLADCYRAGGDQVSGKRNYTYMDAVESYLGGRQVWFCGLCQYVNLVGTAIGYTITASISAAAVYKSNCFHKNGHSADCSVFTTSYMVVFGVVQVFFSQLQSLHEVAWLSVLAAVMSFSYSAIAVGLSLAQTISGPTGMTTMSGTVIGIDVDLSHKIWQALQALGNIAFAYSYSLVLIEIQDTIRSPPAESKTMRKANALAMPVITAFYTLCGCLGYAAFGNAAPGNMLTGFGFYDPYWLVGLANACIVVHLVGAYQVMSQPVFTAVESWASSRWPRCGFFVTGGGGTRLISVNAFRLAWRTAYVVACTAVAAVVPFFNDVLGLLGAVGFWPLTVYFPVEMYIRRRKLERSSKRWVALQSLNAVCFVVTLASAVASVQGIAESMAHYVPFKSKL

SEQ ID NO: 604 - DNA, 1464 bp, Brassica napus
  CDS (1)..(1464)
atgggtgaaaccgctgccgccaaccatcaccaccaccatcacggccaccaagtctttgacgcgtacgtccctccacaaccagctttcaaatgctttgacgatgatggccgtctcaaaagaaccgggactgtttggaccgcaagcgctcatataattacagcagtgatcggatccggcgttctctcgttggcatgggccattgcacagctcggatgggtcgctggacctgcggtgatgctagtgttctctttagttactctctactcttccacacttctcagcgactgctacagaaccggagatgcagtctccggcaagagaaactacacttacatggacgcagttcgatccattctcggtgggttcaagttcaagatatgtgggctgattcaatacttgaatctctttggtatcgcgatcggatacacaatagcagcatccataagcatgatggcgatcaagagatcgaactgtttccacaagagcggaggaaaagacccgtgtcacatgtcgagcaacccttacatgatcatcttcggtgtgacagagatcttgctctctcaggttcctgacttcgaccagatttggtggatctccattgtagcagctgttatgtctttcacttactctgccattggtctagctctagggatcgttcaagttgctgctaatggagtgttcaaaggaagtctcactggaataagcattggaacagtgactcaaacacagaagatatggagaaccttccaagcacttggagatattgcctttgcttactcatactctgttgtcctaatagagattcaggatactgtaagatcaccaccatcagaatcaaaaacgatgaagaaagctacaaaactcagtattgcaatcacaaccatcttctacatgctatgtggctcaatgggttacgcagcctttggagatgcagcaccaggaaacctcctcaccggtttcggattctacaaccccttttggctcctcgacatagccaacgccgccatcgtagtccacctcataggagcttaccaagtcttctcccagcccatcttcgccttcgctgaaaaatcagcctcggagaggtttccagacaatgacttgctcaccaaggaactcgagttcaagatcccagggtttaggtctccgtacaaaaccaacgttttcagggtagtgttcaggtgctctttcgtcgttctaaccacggtgatatcgatgctgatgccgttcttcaacgacgtggtggggatcttgggggccttagggttttggcccttgacggtttatttcccggtggagatgtatataaagcagaggaaggtggagaaatggagcacgaggtgggtttgtttacagatgcttagtgttgcttgtctagtgatctcggtggtcgccggagttggatcaatcgctggagtaatgcttgatcttaaggtctacaagcccttccagtctacgtattga

SEQ ID NO: 605 - protein, 487 aa, Brassica napus
MGETAAANHHHHHHGHQVFDAYVPPQPAFKCFDDDGRLKRTGTVWTASAHIITAVIGSGVLSLAWAIAQLGWVAGPAVMLVFSLVTLYSSTLLSDCYRTGDAVSGKRNYTYMDAVRSILGGFKFKICGLIQYLNLFGIAIGYTIAASISMMAIKRSNCFHKSGGKDPCHMSSNPYMIIFGVTEILLSQVPDFDQIWWISIVAAVMSFTYSAIGLALGIVQVAANGVFKGSLTGISIGTVTQTQKIWRTFQALGDIAFAYSYSVVLIEIQDTVRSPPSESKTMKKATKLSIAITTIFYMLCGSMGYAAFGDAAPGNLLTGFGFYNPFWLLDIANAAIVVHLIGAYQVFSQPIFAFAEKSASERFPDNDLLTKELEFKIPGFRSPYKTNVFRVVFRCSFVVLTTVISMLMPFFNDVVGILGALGFWPLTVYFPVEMYIKQRKVEKWSTRWVCLQMLSVACLVISVVAGVGSIAGVMLDLKVYKPFQSTY

SEQ ID NO: 606 - DNA, 1446 bp, Brassica napus
  CDS (1)..(1446)
atggagaaaaagagcatgttcattgaacaaagcttcaccgatcacaagagtggcgatatgaacaaaaactttgacgatgatggacgccagaaaagaacagggacttggatgacggggagcgcccatataataacagcggtgataggatcaggagtgttgtcactggcgtgggcaattgcacagctcggatgggtggcaggacccgccgtacttatggctttttccttcataacatactttacatcaaccatgcttgccgactgttatcgttccccggatcctgtcactggaaaacgaaactatacctacatggaagttgtccgctcttacttaggaggaagaaaagtgatgttatgtggattggctcaatacgggaatctgattggaataacaatcggctacacaatcacagcgtcgattagcatggtggcagtgaagaggtcgaattgtttccacaagaatggacataatgtgaaatgttccacttcaaacactcccttcatgatcatattcgcatgcatccaaattgtacttagccaaatcccaaatttccacaatctctcttggctctccattctagcggccgtaatgtccttttcttacgcctccattggtatcggtctctccatcgccaaagtggccggtggcggtgtgcacgcaaggacggccctgacaggagttacggtcggagttgatgttactggttctgagaaagtatggagaacattccaagcggttggagatatcgcatttgcttatgcctactcaaccgtacttattgagatacaggacaccttaaaagcaagtccaccatcagaaaacaaagccatgaaaagagcaagccttgtgggtgtatccacaacgaccttcttttacatgttatgcgggtgtgtgggttatgctgcctttggcaataatgcgcctggaaatttcctaaccggttttggtttttatgagcccttctggctaatcgactttgccaatgtctgcatcgctgtgcatcttgttggggcctatcaggtcttttgccagccaatcttccaatttgtagagagccagagtgcaaaacgttggccagataacaagtttattacaggagagtacaaaatgaacgtcccttgcggtggtgattttggtatcagcttgtttagattggtttggaggacttcatatgttgtagttacggctgttgtagcaatgatcttccctttcttcaacgatttcttgggtcttattggagcagcttccttttggcctttgactgtttactttcccattgagatgcatattgctcagaaaaatatgaagaaattttctttcacttggacatggctgaaaatcttgagctgggcttgtttcctcgtctccctcgttgctgctgctggatctgtgcaaggactcatacaaagtcttaaggatttcaagcctttccaggctcccgagtag

SEQ ID NO: 607 - protein, 481 aa, Brassica napus
MEKKSMFIEQSFTDHKSGDMNKNFDDDGRQKRTGTWMTGSAHIITAVIGSGVLSLAWAIAQLGWVAGPAVLMAFSFITYFTSTMLADCYRSPDPVTGKRNYTYMEVVRSYLGGRKVMLCGLAQYGNLIGITIGYTITASISMVAVKRSNCFHKNGHNVKCSTSNTPFMIIFACIQIVLSQIPNFHNLSWLSILAAVMSFSYASIGIGLSIAKVAGGGVHARTALTGVTVGVDVTGSEKVWRTFQAVGDIAFAYAYSTVLIEIQDTLKASPPSENKAMKRASLVGVSTTTFFYMLCGCVGYAAFGNNAPGNFLTGFGFYEPFWLIDFANVCIAVHLVGAYQVFCQPIFQFVESQSAKRWPDNKFITGEYKMNVPCGGDFGISLFRLVWRTSYVVVTAVVAMIFPFFNDFLGLIGAASFWPLTVYFPIEMHIAQKNMKKFSFTWTWLKILSWACFLVSLVAAAGSVQGLIQSLKDFKPFQAPE

SEQ ID NO: 608 - DNA, 1458 bp, Brassica napus
  CDS (1)..(1458)
atgaagagtttcaacaccgatcaacacggtcactccgcggcggaatccggcgacgtctacgccatgtccgatccaacaaagaacgttgatgacgatggccgagagaagaggacggggacgtggcttacggcgagtgcgcatattatcacggcggtaataggctcaggagtgttgtcgttggcatgggccatagctcagcttggttggatagcagggactttgattctgatcattttctcgtttatcacgtacttcacttctacgatgctcgctgattgctaccgtgcgccggatcccctcaccggaaaacgaaactacacttacatggacgttgttcgatcttacctcggtggtaggaaagtgcagctttgtggagtggcacagtatgggaatctgataggaatcactgttgggtacaccatcactgcttctattagtttggtagcgatcgggaaagcgaactgttaccacaataaagggcaccatgcagattgtacaatatcaaactatccatatatggcggccttcgggatcattcaaatccttcttagccagatccccaactttcacaagctctcttttctctcccttatggctgcggttatgtctttcgcttacgcaagtattgggattggcctagccatcgcgacggtcgcaggtgggaaagtgggtaagacgaatatgacgggaacggtggtaggagttgatgtaactgcggctcagaagatatggagatcgtttcaagcggttggagacatagcgtttgcatatgcttacgccacggttctcattgagattcaggacacattgagatctagcccagcagagaacaaagctatgaaaagagcaagttttgtgggagtatcaaccaccactttcttctacatcttatgtggttgtcttggatatgctgcatttggaaacaaagcccctggagatttcctcaccaatttcggattctacgagccattttggctcattgactttgcaaacgcttgcattgctttccatctcattggtgcctatcaggtgttcgcgcagcccatattccagtttgttgagaagaaatgcaatagaaactggcctgacaacaagttcatcacatctgaatattcagtaaacataccattccttggaaaatttagcatcaacctcttcagactagtgtggaggacagcttatgtggttataacaactttggtagctatgatattccctttcttcaacgccatcttgggtcttatcggagcagcttccttctggcctttaacggtttatttccccgtggagatgcacatagcacaaactaaggttaagaaatactcttctagatggattgggctgaaaatgttgtgctgggtttgcttgatcgtctccctgttagccgctgctggatccatcgctggactgataagtagtgtcaagacatacaagcccttccggactatccatgagtga

SEQ ID NO: 609 - protein, 485 aa, Brassica napus
MKSFNTDQHGHSAAESGDVYAMSDPTKNVDDDGREKRTGTWLTASAHIITAVIGSGVLSLAWAIAQLGWIAGTLILIIFSFITYFTSTMLADCYRAPDPLTGKRNYTYMDVVRSYLGGRKVQLCGVAQYGNLIGITVGYTITASISLVAIGKANCYHNKGHHADCTISNYPYMAAFGIIQILLSQIPNFHKLSFLSLMAAVMSFAYASIGIGLAIATVAGGKVGKTNMTGTVVGVDVTAAQKIWRSFQAVGDIAFAYAYATVLIEIQDTLRSSPAENKAMKRASFVGVSTTTFFYILCGCLGYAAFGNKAPGDFLTNFGFYEPFWLIDFANACIAFHLIGAYQVFAQPIFQFVEKKCNRNWPDNKFITSEYSVNIPFLGKFSINLFRLVWRTAYVVITTLVAMIFPFFNAILGLIGAASFWPLTVYFPVEMHIAQTKVKKYSSRWIGLKMLCWVCLIVSLLAAAGSIAGLISSVKTYKPFRTIHE

SEQ ID NO: 610 - DNA, 1416 bp, Lycopersicon esculentum
  CDS (1)..(1416)
atggcagataaaccacatcaagtatttgaggtttatggtgaatcgaaatgttttgatgacgatggtcgtatcaaaaggactgggtctgtttggacggcaagtgctcacatcataactgctgtgataggatcaggagttttatcattggcttgggctactgctcagcttggatgggtagctgggccaactgtattgctacttttctcctttgttacttactatacctctgctttgctttccgattgttaccggaccggtgatccagttaccggaaaaagaaattatacttatatggatgctgttcgagccaatctaggtggatttcaggttaagatttgtggtgtgattcagtatgcaaatctttttggagttgcaattggttataccatagcgtcttccattagtatggtggctgtgaataggtctaattgtttccataaacaaggtcatcatgctgcttgcaatgtttcaagtactccctatatgatcatgtttggtgtgatggaaattatcttctcacaaatcccggatttcgatcagatttcttggctttcgattgttgctgctgttatgtcgtttacttactctacaattggtcttggcttaggagttgctcaagttgcagaaacaggaaaaattgaaggaagtttaactgggattagcattggaactgaagtaactgaaatgcagaagatttggagaagctttcaagctcttggagctatagcttttgcttattcctactccctaatccttatcgaaattcaggatacactcaaatcaccaccagcagaagcaaagacaatgaaaagggcaacactaattagtgtggcagttacaacagtattctacatgctttgtggttgctttgggtatgcagcattcggagatcaatcccctggaaacctactaacaggattcggattctacaacccctattggcttcttgacatcgcgaacatagccatggttgttcacctagtaggtgcataccaagtttactgtcaaccccttttcgcctttgttgaaaaaacagcagctgaatggtaccctgacagcaaaatcataacaaaagaaatcgatgtcccaatcccgggattcaaacctttcaagctcaaccttttccgtctagtctggagggcaatattcgtgatcatcaccacagtcatatcaatgttgatgcccttctttaacgacgtcgttggcattcttggagcatttggattttggccacttacagtatacttcccagtggaaatgtacattgtgcaaaagagaattaccaaatggagtgcaagatggatatgtctacaaatacttagtggtgcttgccttgttatctcaattgctgcagctgctggttcttttgctggagttgtttctgatttaaaagtttacaggccttttcagagttaa

SEQ ID NO: 611 - protein, 471 aa, Lycopersicon esculentum
MADKPHQVFEVYGESKCFDDDGRIKRTGSVWTASAHIITAVIGSGVLSLAWATAQLGWVAGPTVLLLFSFVTYYTSALLSDCYRTGDPVTGKRNYTYMDAVRANLGGFQVKICGVIQYANLFGVAIGYTIASSISMVAVNRSNCFHKQGHHAACNVSSTPYMIMFGVMEIIFSQIPDFDQISWLSIVAAVMSFTYSTIGLGLGVAQVAETGKIEGSLTGISIGTEVTEMQKIWRSFQALGAIAFAYSYSLILIEIQDTLKSPPAEAKTMKRATLISVAVTTVFYMLCGCFGYAAFGDQSPGNLLTGFGFYNPYWLLDIANIAMVVHLVGAYQVYCQPLFAFVEKTAAEWYPDSKIITKEIDVPIPGFKPFKLNLFRLVWRAIFVIITTVISMLMPFFNDVVGILGAFGFWPLTVYFPVEMYIVQKRITKWSARWICLQILSGACLVISIAAAAGSFAGVVSDLKVYRPFQS

SEQ ID NO: 612 - DNA, 1398 bp, Lycopersicon esculentum
  CDS (1)..(1398)
atgggtagtggagccattgatgattcttccaagtttgatgatgatggaagacccaaaagaactggaacggtgttgactacaagtgctcatataataacagcagtgataggttcaggagtgttatctttggcatgggctacagcccaattgggatggatagcaggaccagttgcactcattgctttctcagccataacatggtttgcttctatcctccttgctgattgctatcgcgcccccgatggctctcgtagctacacctatatggatgctgttcgagcccatctaggaggaaggaaagtccagctttgtggattagctcaatatagtaacctttttggtgttaccattggatatgcaatcaccacatccataagcatggtggcaattaaaagatctaactgctttcataggaaaggtcatgatgctggttgtcatgagtcaaacaatcccttcataattatctttggggttatgcaaatccttctatcccaaatcccaaattttcacaagctttcattcctttccatcattgctgctgccatgtcctttgcttattctttcattggacttggtctatccattgccaagattgcaaaggatggagtaagtgcaaatacaagcttaacagggacaatagttggaaaagatgtatcaagcagagacaagatgtggaacaccttctctgctcttggagatattgcctttgcctatgctttctctattgttcttattgaaattcaggacactttgaaatcccatccaccagaaaataagtccatgaagaaagctacattcactggtatctctgtgtcaacaatattttacttactctgtggacttctagggtatgctgcatttggaaacaaagcgcctggaaactttctaacaggatttggattctatgaacctttctggcttattgatttcgctaatgtatgcatcgtgattcatctcgttggagcttaccaggtgttctgtcaacctatatttggatttgtagagggttggagcagacagaaatggccagaaagtaaattcataacaaaagaatacatgattaacctttcacacttggggttgttcaatttcaatttttacaggctggtgtggagaactttatatgtggtattcacaaccatattagccatgttattcccattcttcaacgatttcgtcggttttattggagcagcctcattttggccactcactgtctatttccctattcagatgtacatagcacaagccaagatacctaaatattcatttacctggatttggttgaatatattgagttttgtgtgcctgatcatctcacttcttgctgctgctggatctgttagaggccttataaaatctctccaggaattcgagcccttccaatctcggtcttga

SEQ ID NO: 613 - protein, 465 aa, Lycopersicon esculentum
MGSGAIDDSSKFDDDGRPKRTGTVLTTSAHIITAVIGSGVLSLAWATAQLGWIAGPVALIAFSAITWFASILLADCYRAPDGSRSYTYMDAVRAHLGGRKVQLCGLAQYSNLFGVTIGYAITTSISMVAIKRSNCFHRKGHDAGCHESNNPFIIIFGVMQILLSQIPNFHKLSFLSIIAAAMSFAYSFIGLGLSIAKIAKDGVSANTSLTGTIVGKDVSSRDKMWNTFSALGDIAFAYAFSIVLIEIQDTLKSHPPENKSMKKATFTGISVSTIFYLLCGLLGYAAFGNKAPGNFLTGFGFYEPFWLIDFANVCIVIHLVGAYQVFCQPIFGFVEGWSRQKWPESKFITKEYMINLSHLGLFNFNFYRLVWRTLYVVFTTILAMLFPFFNDFVGFIGAASFWPLTVYFPIQMYIAQAKIPKYSFTWIWLNILSFVCLIISLLAAAGSVRGLIKSLQEFEPFQSRS

SEQ ID NO: 614 - DNA, 1431 bp, Lycopersicon esculentum
  CDS (1)..(1431)
atgggagattctacgaattttgcagcaaaacatcctgtttctatcaatataactgaatccaagctttttgacgacgatgggcgtatcaaaagaagtggaagtgtttggactgcaagtgctcatatcataactgctgtgattggttcaggcgttttatctttggcttgggctgtagctcaacttggttggattgctggtcctattgttatgcttttattctcttttgttacttattacacctcttctctgctctccgattgttaccgctccggcgacccacttttcggcaagagaaactatacttacatggatgttgtacaagcaaatctcagtggcttacaggtaaagatttgtggatggattcagtatgtgaatctgtttggagttgctattgggtacacaattgcttcttcaattagcctgatggctgttaaaaggtcagattgttttcataaacatggtcataaagcaccttgtttacaaccaaatactccatatatgatcatatttggagtaatagaaatcatcttctcacaaataccagattttgatcaaatttggtggctttcaattgttgctgctgtaatgtctttcacttactccaccatcggcttaggtttaggcattgctcatgtagcagaaactggaaaaattggtgggagtttaactggagtgagcattggaactgtgactgaaatgcaaaaagtttggagaacttttcaagcacttggagctattgcttttgcttattcttactccctcatccttatcgagattcaggatacaatcaaatccccaccctcagaagccaagacaatgaaaaatgcaactataattagtgtatcagtaacaacagttttctacatgctatgtggttgttttggctatgcagcatttggagaccatgctcctgacaatttactaactggttttggattttacgacccttattggctactagatatagccaacatagccatcttcgttcatcttgtaggtgcataccaggtttactgccaacccctttttgctttcattgaaaaaacagcagcagaatggtaccctaacagtaaaatcatcaccaagaatattagtgtgccaatccctggctttaaatcgtacaacatttacctattcagactagtttggaggacgatctttgttatcatatccactatcatctctatgttgttgccattcttcagcgacatcgttggaatacttggagcatttggattttggccgttgactgtttattatccagtggaaatatacattgtgcaaaagaagataccaaaatggagtagaaaatggtttggtcttcaaattctgagtgttacttgtcttattgtctcaattgctgcagctgttggttcttttgctggtgttgtatctgatcttaaagtttacaagcctttcaaatttacttag

SEQ ID NO: 615 - protein, 476 aa, Lycopersicon esculentum
MGDSTNFAAKHPVSINITESKLFDDDGRIKRSGSVWTASAHIITAVIGSGVLSLAWAVAQLGWIAGPIVMLLFSFVTYYTSSLLSDCYRSGDPLFGKRNYTYMDVVQANLSGLQVKICGWIQYVNLFGVAIGYTIASSISLMAVKRSDCFHKHGHKAPCLQPNTPYMIIFGVIEIIFSQIPDFDQIWWLSIVAAVMSFTYSTIGLGLGIAHVAETGKIGGSLTGVSIGTVTEMQKVWRTFQALGAIAFAYSYSLILIEIQDTIKSPPSEAKTMKNATIISVSVTTVFYMLCGCFGYAAFGDHAPDNLLTGFGFYDPYWLLDIANIAIFVHLVGAYQVYCQPLFAFIEKTAAEWYPNSKIITKNISVPIPGFKSYNIYLFRLVWRTIFVIISTIISMLLPFFSDIVGILGAFGFWPLTVYYPVEIYIVQKKIPKWSRKWFGLQILSVTCLIVSIAAAVGSFAGVVSDLKVYKPFKFT

SEQ ID NO: 616 - DNA, 1431 bp, Arabidopsis thaliana
  CDS (1)..(1431)
atggttcaaaaccaccaaacagttctcgccgtcgatatgccacaaaccggcggctccaagtacttggacgacgacgggaaaaacaaaagaactgggagtgtttggacggcgagtgcacacataataacggcagtgataggttcgggagttttgtcactagcgtgggctacggcgcagctaggttggctcgccggaccggtggtgatgttgctcttctctgtcgtcacttatttcacttcttctcttcttgctgcttgttaccgctccggcgaccctatctccggcaagaggaactacacttatatggatgctgtccgatcaaatctcggtggcgtgaaggtgacgctatgtgggattgttcagtatcttaatatctttggtgttgctattggctacacaattgcttcggctataagcatgatggcaataaagagatcaaactgtttccacaagagtggagggaaagatccatgtcacatgaacagtaatccttacatgatagcttttggattagtccagattctattctctcagattccagattttgatcaactttggtggctctcaatcctcgccgccgttatgtccttcacttattcctcagccggtctcgccctcggcatagcccaagttgtcgttaatgggaaggtgaagggaagtctcactgggattagcataggagcagtaacagagacacagaagatatggaggacctttcaagctcttggagacattgcttttgcttactcttactccattatcctcatcgagattcaggacacagtgaagtcaccaccatcagaagagaagacgatgaagaaggcaacacttgtgagcgtcagtgtaacgactatgttctatatgttgtgtggatgtatgggatatgcagcctttggagacttgtctcccggaaatctcttaaccggtttcgggttttataatccttattggcttcttgacattgcaaatgcagccattgtgattcaccttattggtgcataccaagtctattgccaacctctgtttgctttcatcgagaagcaagcttcgattcaattccctgatagtgagttcattgcaaaagatatcaaaattccaattcctggtttcaagcctctccgcttgaatgtcttcaggttgatatggaggacagtgtttgtgatcataacgacagttatctcaatgcttcttccgtttttcaacgacgttgtgggtctgctcggggcactagggttttggccattgacggtgtattttccagtggaaatgtacatcgcgcagaagaagatacctagatggagcaccagatgggtttgccttcaagtcttcagcttagggtgtctagtagttagcattgctgcagctgcagggtccatagctggagtacttcttgatctaaagtcctacaagccatttcgaagcgaatactga

SEQ ID NO: 617 - protein, 476 aa, Arabidopsis thaliana
MVQNHQTVLAVDMPQTGGSKYLDDDGKNKRTGSVWTASAHIITAVIGSGVLSLAWATAQLGWLAGPVVMLLFSVVTYFTSSLLAACYRSGDPISGKRNYTYMDAVRSNLGGVKVTLCGIVQYLNIFGVAIGYTIASAISMMAIKRSNCFHKSGGKDPCHMNSNPYMIAFGLVQILFSQIPDFDQLWWLSILAAVMSFTYSSAGLALGIAQVVVNGKVKGSLTGISIGAVTETQKIWRTFQALGDIAFAYSYSIILIEIQDTVKSPPSEEKTMKKATLVSVSVTTMFYMLCGCMGYAAFGDLSPGNLLTGFGFYNPYWLLDIANAAIVIHLIGAYQVYCQPLFAFIEKQASIQFPDSEFIAKDIKIPIPGFKPLRLNVFRLIWRTVFVIITTVISMLLPFFNDVVGLLGALGFWPLTVYFPVEMYIAQKKIPRWSTRWVCLQVFSLGCLVVSIAAAAGSIAGVLLDLKSYKPFRSEY

SEQ ID NO: 618 - DNA, 1401 bp, Arabidopsis thaliana
  CDS (1)..(1401)
  misc_feature (177)..(177): s is g or c
  misc_feature (178)..(178): y is t or c
  misc_feature (660)..(660): k is g or t
  misc_feature (1375)..(1375): y is t or c
  misc_feature (1376)..(1376): h is a, c or t
atggatgttccacggccagctttcaaatgttttgatgacgatggccggcttaaacgttcagggacggtttggaccgcgagtgcgcatatcataaccgccgtgattggatctggtgttctatcgcttgcgtgggctataggtcaactcggttggatcgcaggtcctacagtgatgttsytgttctcttttgtcacttactactcttccacgcttcttagcgactgctacagaaccggagatcctgtctctgggaagagaaactatacttacatggacgctgtccgatcaatcctaggtggctttaggttcaagatttgtgggctgattcagtatttgaatctgtttggtatcacggtcgggtacacaatcgcagcatctataagtatgatggcgatcaagaggtccaactgtttccacgagagcggagggaaaaacccgtgtcacatgtcgagcaatccatacatgatcatgtttggtgtgaccgagatcttgctctctcagatcaaagattttgaccagatttggtggctctccattgtcgctgctatcatgtccttcacatactctgcaatcggtttagctctcggaatcattcaagtcgcggcaaatggagttgtcaagggaagtctcaccggaattagcatcggcgcagtgactcakacccaaaaaatatggagaacctttcaagcacttggagacattgcctttgcttattcatactctgttgttcttattgaaattcaggacactgtaagatctccaccagcagaatcaaaaacgatgaagatcgccacaagaatcagcatcgctgttacaacgacattttacatgctatgtggttgtatgggctatgccgccttcggagataaagcaccgggaaacctcttaaccggttttggtttctacaatccgttttggctccttgacgtggctaacgctgccatagttatccaccttgtaggagcttatcaagtctttgctcagcccatcttcgcctttattgagaaacaagctgccgctaggtttcccgacagtgacttggtgaccaaggaatacgaaatccgaatccctggttttaggtcaccgtacaaagtcaacgttttcagagcagtttaccgaagcgggtttgtggttttgaccactgtgatatccatgcttatgccgtttttcaacgacgtcgtagggattttaggtgcgttagggttttggcctttgacggtttactttccggtggagatgtatataagacagaggaaggttgagagatggagtatgaagtgggtttgtctgcagatgttgagctgtggttgtttgatgatcacgttggtcgccggagttggctccatcgccggagtaatgctagaccttaaggttyhcaagccgttcaagactacttactaa

SEQ ID NO: 619 - protein, 466 aa, Arabidopsis thaliana
  misc_feature (59)..(59): The Xaa at location 59 stands for Leu, or Phe.
  misc_feature (220)..(220): The Xaa at location 220 stands for Gln, or His.
  misc_feature (459)..(459): The Xaa at location 459 stands for His, Leu, Phe, Pro, Ser, or Tyr.
MDVPRPAFKCFDDDGRLKRSGTVWTASAHIITAVIGSGVLSLAWAIGQLGWIAGPTVMXLFSFVTYYSSTLLSDCYRTGDPVSGKRNYTYMDAVRSILGGFRFKICGLIQYLNLFGITVGYTIAASISMMAIKRSNCFHESGGKNPCHMSSNPYMIMFGVTEILLSQIKDFDQIWWLSIVAAIMSFTYSAIGLALGIIQVAANGVVKGSLTGISIGAVTXTQKIWRTFQALGDIAFAYSYSVVLIEIQDTVRSPPAESKTMKIATRISIAVTTTFYMLCGCMGYAAFGDKAPGNLLTGFGFYNPFWLLDVANAAIVIHLVGAYQVFAQPIFAFIEKQAAARFPDSDLVTKEYEIRIPGFRSPYKVNVFRAVYRSGFVVLTTVISMLMPFFNDVVGILGALGFWPLTVYFPVEMYIRQRKVERWSMKWVCLQMLSCGCLMITLVAGVGSIAGVMLDLKVXKPFKTTY

SEQ ID NO: 620 - DNA, 1482 bp, Arabidopsis thaliana
  CDS (1)..(1482)
atgggtgaaaccgctgccgccaataaccaccgtcaccaccaccatcacggccaccaggtctttgacgtggccagccacgatttcgtccctccacaaccggcttttaaatgcttcgatgatgatggccgcctcaaaagaactgggactgtttggaccgcgagcgctcatataataactgcggttatcggatccggcgttttgtcattggcgtgggcgattgcacagctcggatggatcgctggccctgctgtgatgctattgttctctcttgttactctttactcctccacacttcttagcgactgctacagaaccggcgatgcagtgtctggcaagagaaactacacttacatggatgccgttcgatcaattctcggtgggttcaagttcaagatttgtgggttgattcaatacttgaatctctttgttatcgcaattggatacacgatagcagcttccataagcatgatggcgatcaagagatccaactgcttccacaagagtggaggaaaagacccatgtcacatgtccagtaatccttacatgatcgtatttggtgtggcagagatcttgctctctcaggttcctgatttcgatcagatttggtggatctccattgttgcagctgttatgtccttcacttactctgccattggtctagctcttggaatcgttcaagttgcagcgaatggagttttcaaaggaagtctcactggaataagcatcggaacagtgactcaaacacagaagatatggagaaccttccaagcacttggagacattgcctttgcgtactcatactctgttgtcctaatcgagattcaggatactgtaagatccccaccggcggaatcgaaaacgatgaagaaagcaacaaaaatcagtattgccgtcacaactatcttctacatgctatgtggctcaatgggttatgccgcttttggagatgcagcaccgggaaacctcctcaccggttttggattctacaacccgttttggctccttgacatagctaacgccgccattgttgtccacctcgttggagcttaccaagtctttgctcagcccatctttgcctttattgaaaaatcagtcgcagagagatatccagacaatgacttcctcagcaaggaatttgaaatcagaatccccggatttaagtctccttacaaagtaaacgttttcaggatggtttacaggagtggctttgtcgttacaaccaccgtgatatcgatgctgatgccgttttttaacgacgtggtcgggatcttaggggcgttagggttttggcccttgacggtttattttccggtggagatgtatattaagcagaggaaggttgagaaatggagcacgagatgggtgtgtttacagatgcttactgttgcttgtcttgtgatctcggtggtcgccggggttggatcaatcgccggagtgatgcttgatcttaaggtctataagccattcaagtctacatattga

SEQ ID NO: 621 - protein, 493 aa, Arabidopsis thaliana
MGETAAANNHRHHHHHGHQVFDVASHDFVPPQPAFKCFDDDGRLKRTGTVWTASAHIITAVIGSGVLSLAWAIAQLGWIAGPAVMLLFSLVTLYSSTLLSDCYRTGDAVSGKRNYTYMDAVRSILGGFKFKICGLIQYLNLFVIAIGYTIAASISMMAIKRSNCFHKSGGKDPCHMSSNPYMIVFGVAEILLSQVPDFDQIWWISIVAAVMSFTYSAIGLALGIVQVAANGVFKGSLTGISIGTVTQTQKIWRTFQALGDIAFAYSYSVVLIEIQDTVRSPPAESKTMKKATKISIAVTTIFYMLCGSMGYAAFGDAAPGNLLTGFGFYNPFWLLDIANAAIVVHLVGAYQVFAQPIFAFIEKSVAERYPDNDFLSKEFEIRIPGFKSPYKVNVFRMVYRSGFVVTTTVISMLMPFFNDVVGILGALGFWPLTVYFPVEMYIKQRKVEKWSTRWVCLQMLTVACLVISVVAGVGSIAGVMLDLKVYKPFKSTY

SEQ ID NO: 622 - DNA, 1401 bp, Arabidopsis thaliana
  CDS (1)..(1401)
atggatgttccacggccagctttcaaatgttttgatgacgatggccggcttaaacgttcagggacggtttggaccgcgagtgcgcatatcataaccgccgtgattggatctggtgttctatcgcttgcgtgggctataggtcaactcggttggatcgcaggtcctacagtgatgttgttgttctcttttgtcacttactactcttccacgcttcttagcgactgctacagaaccggagatcctgtctctgggaagagaaactatacttacatggacgctgtccgatcaatcctaggtggctttaggttcaagatttgtgggctgattcagtatttgaatctgtttggtatcacggtcgggtacacaatcgcagcatctataagtatgatggcgatcaagaggtccaactgtttccacgagagcggagggaaaaacccgtgtcacatgtcgagcaatccatacatgatcatgtttggtgtgaccgagatcttgctctctcagatcaaagattttgaccagatttggtggctctccattgtcgctgctatcatgtccttcacatactctgcaatcggtttagctctcggaatcattcaagtcgcggcaaatggagttgtcaagggaagtctcaccggaattagcatcggcgcagtgactcagacccaaaaaatatggagaacctttcaagcacttggagacattgcctttgcttattcatactctgttgttcttattgaaattcaggacactgtaagatctccaccagcagaatcaaaaacgatgaagatcgccacaagaatcagcatcgctgttacaacgacattttacatgctatgtggttgtatgggctatgccgccttcggagataaagcaccgggaaacctcttaaccggttttggtttctacaatccgttttggctccttgacgtggctaacgctgccatagttatccaccttgtaggagcttatcaagtctttgctcagcccatcttcgcctttattgagaaacaagctgccgctagttttcccgacagtgacttggtgaccaaggaatacgaaatccgaatccctggttttaggtcaccgtacaaagtcaacgttttcagagcagtttaccgaagcgggtttgtggttttgaccactgtgatatccatgcttatgccgtttttcaacgacgtcgtagggattttaggtgcgttagggttttggcctttgacggtttactttccggtggagatgtatataagacagaggaaggttgagagatggagtatgaagtgggtttgtctgcagatgttgagctgtggttgtttgatgatcacgttggtcgccggagttggctccatcgccggagtaatgctagaccttaaggtttacaagccgttcaagactacttactaa

SEQ ID NO: 623 - protein, 466 aa, Arabidopsis thaliana
MDVPRPAFKCFDDDGRLKRSGTVWTASAHIITAVIGSGVLSLAWAIGQLGWIAGPTVMLLFSFVTYYSSTLLSDCYRTGDPVSGKRNYTYMDAVRSILGGFRFKICGLIQYLNLFGITVGYTIAASISMMAIKRSNCFHESGGKNPCHMSSNPYMIMFGVTEILLSQIKDFDQIWWLSIVAAIMSFTYSAIGLALGIIQVAANGVVKGSLTGISIGAVTQTQKIWRTFQALGDIAFAYSYSVVLIEIQDTVRSPPAESKTMKIATRISIAVTTTFYMLCGCMGYAAFGDKAPGNLLTGFGFYNPFWLLDVANAAIVIHLVGAYQVFAQPIFAFIEKQAAASFPDSDLVTKEYEIRIPGFRSPYKVNVFRAVYRSGFVVLTTVISMLMPFFNDVVGILGALGFWPLTVYFPVEMYIRQRKVERWSMKWVCLQMLSCGCLMITLVAGVGSIAGVMLDLKVYKPFKTTY

SEQ ID NO: 624 - DNA, 1446 bp, Vicia faba var
  CDS (1)..(1446)
atggttgttgagaagaatgctagcaacaatcatcaccaaacattttatgtctccattgatcaacaaatagattctaagtttttcgacgacgatggtcgcgtcaaacgaacaggcacatcatggacggcaagtgcccatgtaataacagctgtgataggatctggagtgctgtctctagcttgggctatagctcagcttggatggattgctggtcctattgtcatgtttctctttgcttgggttacttattacacctccgttcttctctgtgaatgttatcgtaatggcgatcccgtcaatggcaagagaaactacacttacatggaagttgttcattcaaatctcggtggttttcaagtccaattatgtggactaattcaatatctcaaccttgttggggttgcgattggatacacggtagcttctgccataagcatgatggcaattgtaaggtcaaattgttttcataggagtggaggaaaagatccatgtcatatgaacagcaacatttacatgattgcatttggtgctgtgcaaattatattctctcaaattcctgattttgatcaattatggtggctttccatcgttgctgttgttatgtcctttacatattccacaattggtcttggccttggtattggaaaagttatagagaacaaaaagtttgctggaaccattactgggataaatgatgtgacaaaagctcaaaaaacttgggggagtttgcaagctcttggtgacatagcttttgcttactcattctccatgattcttatagaaattcaggatacaataaaagcaccacctccatcagagtcgaaaacaatgaagaaggctacattaatcagtgttatagtgacaacatttttctacatgctttgcggttgtttcggatacgcagcgtttggaaattcaagtcccggaaatcttttaaccggtttcggattctataacccattttggctccttgacatagccaatgctgccatagtgatccaccttattggtgcataccaagtttattgtcaacccctttttgcttttgtcgaaaattacacggcgaaaagattcccagacagtgattttgtgaacaaggacgtaaagattccaattcccggtttagataggtataaactcaacctttttagattggtttggaggacagtttatgtaatactaacaactttgatatcaatgctccttccattcttcaatgatattgttggacttcttggtgcaattggattttggcctctaactgtttattttccggtggagatgtatataattcaaaagaaaataccaaagtggagcacaaaatggatttgccttcaattgcttagtggtgcgtgtcttataatcactatagcagctacaattggttctattgctggccttatccttgatcttaaagtttttaagccattcaagactatctattaa

SEQ ID NO: 625 - protein, 481 aa, Vicia faba var
MVVEKNASNNHHQTFYVSIDQQIDSKFFDDDGRVKRTGTSWTASAHVITAVIGSGVLSLAWAIAQLGWIAGPIVMFLFAWVTYYTSVLLCECYRNGDPVNGKRNYTYMEVVHSNLGGFQVQLCGLIQYLNLVGVAIGYTVASAISMMAIVRSNCFHRSGGKDPCHMNSNIYMIAFGAVQIIFSQIPDFDQLWWLSIVAVVMSFTYSTIGLGLGIGKVIENKKFAGTITGINDVTKAQKTWGSLQALGDIAFAYSFSMILIEIQDTIKAPPPSESKTMKKATLISVIVTTFFYMLCGCFGYAAFGNSSPGNLLTGFGFYNPFWLLDIANAAIVIHLIGAYQVYCQPLFAFVENYTAKRFPDSDFVNKDVKIPIPGLDRYKLNLFRLVWRTVYVILTTLISMLLPFFNDIVGLLGAIGFWPLTVYFPVEMYIIQKKIPKWSTKWICLQLLSGACLIITIAATIGSIAGLILDLKVFKPFKTIY

SEQ ID NO: 626 - DNA, 1461 bp, Vicia faba var
  CDS (1)..(1461)
atggtagaaaacatttccagaacaaaccttagctaccgtggagatactggtggcatcgaggaagccatagatgacgcacctttacaaactgactccaaattctatgatgacgatggccgtgttaaacgaacaggcactgtttggactacatgctcccacataataacaggtgtgataggatctggagtgctctccttagcctggtccgtagctcagatgggttggattgctggtcctgcaaccatgatctttttcagtattatcactctgtatacttcatcatttctcgctgattgttatcgtagtggcgacaccgaatttggaaagagaaactatactttcatggatgcagttcacaatattcttggtgggcccagtgttaagatttgtggggtagttcagtacttgaatcttttcggaagtgcaataggatacaatattgcggctgccatgagcatgatggaaatcagaaagtcttactgtgtccattcctctcatggcgaagacccgtgtcacgtttcgggcaacgcttacatgatagcttttggtgtggcacaacttttcttttctcaaattccagattttcacaacacgtggtggctctcaatagttgcagcagtcatgtcgttcttctattctacaattgctctcgctcttggaatttccaaagttgcagaaacgggtactgtcatgggtagcctcacaggaataagcatcgggacagtgaccccggcccaaaaagtatggggggttttccaagctcttggaaatattgcctttgcctattcatattctttcattctcctggaaattcaggacaccatcaaatctccaccatcggaaggaaaagcaatgaagaaggctgcaaagctaagtattggagtaaccaccacattttatttgctctgtggctgcacgggctatgctgcttttggagatgctgcaccaggtaacctgctcgctggatttggtgtctcgaaagcatatattcttgtagatatggctaatgctgctattgtagttcaccttttcggagcataccaagtgtatgcccaacccctctttgccttcgttgagaaagaggcaggaaaaaaatggcccaaaattgacaaaggatttgaagttaaaattcccggtttgccagtctacaatcaaaacatatttatgttagtttggcggacaatttttgtcatcgtccccacattgattgcaatgttgattccctttttcaatgacgttttgggagtgattggagcattgggattttggcctttaactgtttactttcctgtggagatgtatattattcagaagaagatcccaaaatggagtaggaaatggatttgtctggaaataatgagtactttctgcctcttcgtttctgttgtggctggtcttggttcattgattggtgtctggattgacctgaagaaatacaaaccattcagcttagagaattga

SEQ ID NO: 627 - protein, 486 aa, Vicia faba var
MVENISRTNLSYRGDTGGIEEAIDDAPLQTDSKFYDDDGRVKRTGTVWTTCSHIITGVIGSGVLSLAWSVAQMGWIAGPATMIFFSIITLYTSSFLADCYRSGDTEFGKRNYTFMDAVHNILGGPSVKICGVVQYLNLFGSAIGYNIAAAMSMMEIRKSYCVHSSHGEDPCHVSGNAYMIAFGVAQLFFSQIPDFHNTWWLSIVAAVMSFFYSTIALALGISKVAETGTVMGSLTGISIGTVTPAQKVWGVFQALGNIAFAYSYSFILLEIQDTIKSPPSEGKAMKKAAKLSIGVTTTFYLLCGCTGYAAFGDAAPGNLLAGFGVSKAYILVDMANAAIVVHLFGAYQVYAQPLFAFVEKEAGKKWPKIDKGFEVKIPGLPVYNQNIFMLVWRTIFVIVPTLIAMLIPFFNDVLGVIGALGFWPLTVYFPVEMYIIQKKIPKWSRKWICLEIMSTFCLFVSVVAGLGSLIGVWIDLKKYKPFSLEN

SEQ ID NO: 628 - DNA, 1428 bp, Vicia faba var
  CDS (1)..(1428)
atgacaatggaggagaaggaagaacactctacagaagctgcagttacttcacacaatgactccaaattgttcgacgatgacgaccgtgttaaacgaacaggaacggtttggacaacaagttcgcatataataacagcagtagtaggatcaggagtgttgtcgttggcatgggcgatagctcaattgggttggataattggtttatcagtcatgattttcttcagtctcatcacttggtatacttcatcactcctatccgaatgttatcgaacaggagatcctcatttcgggaaaagaaactatactttcatggaagctgttcacaccattctcgggggtttctatgacaccctttgtgggatagttcagtacagcaatctttatggaactgcagtaggatacacaattggtgcttccattagtatgatggcaataaaaaggtctaactgtttccattcctcgggaggaaaagatggatgtcgcatttcaagcaatccatacatgatcagttttggagtaatccaaattttcttttctcaaattccagattttcatgaaatgtggtggctctcaattgttgcagcaatcatgtctttcacctattcattaattggccttggtctcgcaattgccaaagttgcagaaaatggttccttcaaaggtagtatcacaggagtaagcattggaactgtgacagaagcccaaaaagtatggggagttttccaatctcttggcaacatagctttcgcgtattcatattcacaaattctcattgaaattcaggataccataaaaagtccaccttccgagatgaaaacaatgaagcaagccacaaagataagtataggcgtgacaacgatattttacatgctttgcggcggtatgggctatgctgcatttggagacttgtcaccaggaaacttactcactggatttggtttctataatccatattggctcattgatattgctaacgccgctctcataattcatcttgtgggagcataccaagtttacgcgcaacccttatttgctttcgtcgagaaaataatgataaaaagatggcctaaaataaaaaaggaatacaaacttacaattcctggttttcgtccttaccatctaaatctatttagattaatttggaggactatatttgtgatcacaacaacatttatatcaatgttgattcctttcttcaatgatgttttgggattaattggagcagctggattttggcctttaacagtttattttccagtggagatgtatatcaaacagaagaagattacaaaatggagttataaatggattagtatgcaaactttaagtgttatatgttttgtagtatcagttgtggcttttgttggatcagtgtcaagtattgtggttgatcttaagaaatacaaaccattcacaactgattattga

SEQ ID NO: 629 - protein, 475 aa, Vicia faba var
MTMEEKEEHSTEAAVTSHNDSKLFDDDDRVKRTGTVWTTSSHIITAVVGSGVLSLAWAIAQLGWIIGLSVMIFFSLITWYTSSLLSECYRTGDPHFGKRNYTFMEAVHTILGGFYDTLCGIVQYSNLYGTAVGYTIGASISMMAIKRSNCFHSSGGKDGCRISSNPYMISFGVIQIFFSQIPDFHEMWWLSIVAAIMSFTYSLIGLGLAIAKVAENGSFKGSITGVSIGTVTEAQKVWGVFQSLGNIAFAYSYSQILIEIQDTIKSPPSEMKTMKQATKISIGVTTIFYMLCGGMGYAAFGDLSPGNLLTGFGFYNPYWLIDIANAALIIHLVGAYQVYAQPLFAFVEKIMIKRWPKIKKEYKLTIPGFRPYHLNLFRLIWRTIFVITTTFISMLIPFFNDVLGLIGAAGFWPLTVYFPVEMYIKQKKITKWSYKWISMQTLSVICFVVSVVAFVGSVSSIVVDLKKYKPFTTDY

SEQ ID NO: 630 - DNA, 1542 bp, Glycine max
  CDS (1)..(1542)
atgttgccaagaagtagaacccttcctagcagaatccaccaaggaattatagaagagaggcataatgtcaggcactacttacaagttgaagtgcgacccaataatacccaaacggagaccgaagcgatgaatatccagtctaactattccaagtgcttcgatgatgatggtcgcttgaagagaacaggaacattttggatggcaactgctcatatcatcactgctgtgataggctcaggagtcctttcactagcatgggcggttgctcagcttggttgggttgctggacctattgtcatgtttctctttgccgtcgtcaatctctacacttccaacctattaacacagtgttacaggaccggtgactccgtttctggacacagaaattacacctacatggaggcagtcaactccatcttgggaggaaaaaaggtcaagttatgtggcctcacccaatatatcaatctgtttggagttgcaattggatacaccattgctgcctctgtcagtatgatggccataaaaaggtcgaattgttatcacagcagtcatggaaaagatccctgccacatgtcaagcaatgggtatatgataacattcggaatagcagaagtgatattttcccaaatcccagactttgatcaggtgtggtggctatccatagttgcagctatcatgtccttcacttattcttcagttggattgagtcttggcgtggccaaagtagcagaaaataaaagtttcaaaggaagcctgatgggaattagcattggcacagtaacacaagccggaacagtcactagcacacagaaaatatggaggagtttacaagctctcggggcaatggcctttgcatactccttttccattatcctcatcgaaattcaggacaccataaaatctcctcctgcagagcacaagaccatgagaaaggccacaactttgagcatcgcagttactacagtgttctatttactctgtggatgcatgggttatgcagccttcggagataatgcacctggaaacctcttgactggttttgggttctataacccttactggcttctggacattgccaaccttgcaattgttatccacctagttggggcataccaggttttttcccagcccttatttgcatttgtggaaaaatggagtgcacgtaaatggccaaagagcaattttgtcaccgcagaatatgatatacccattccctgctttggtgtgtaccaactcaacttcttccgcttagtatggaggaccatttttgtgctgttgacgaccctcatagccatgctcatgccttttttcaacgatgtggttggaatacttggcgcttttgggttctggcccttgacagtttatttccctattgacatgtatatttcgcaaaagaagattggacgatggaccagtcgctggcttggacttcagttacttagtgccagttgcctcatcatttcattgttagctgcagttggttccatggcaggggtggttttggacctcaagacttacaagccatttaaaactagttattaa

SEQ ID NO: 631 - protein, 513 aa, Glycine max
MLPRSRTLPSRIHQGIIEERHNVRHYLQVEVRPNNTQTETEAMNIQSNYSKCFDDDGRLKRTGTFWMATAHIITAVIGSGVLSLAWAVAQLGWVAGPIVMFLFAVVNLYTSNLLTQCYRTGDSVSGHRNYTYMEAVNSILGGKKVKLCGLTQYINLFGVAIGYTIAASVSMMAIKRSNCYHSSHGKDPCHMSSNGYMITFGIAEVIFSQIPDFDQVWWLSIVAAIMSFTYSSVGLSLGVAKVAENKSFKGSLMGISIGTVTQAGTVTSTQKIWRSLQALGAMAFAYSFSIILIEIQDTIKSPPAEHKTMRKATTLSIAVTTVFYLLCGCMGYAAFGDNAPGNLLTGFGFYNPYWLLDIANLAIVIHLVGAYQVFSQPLFAFVEKWSARKWPKSNFVTAEYDIPIPCFGVYQLNFFRLVWRTIFVLLTTLIAMLMPFFNDVVGILGAFGFWPLTVYFPIDMYISQKKIGRWTSRWLGLQLLSASCLIISLLAAVGSMAGVVLDLKTYKPFKTSY

SEQ ID NO: 632 - DNA, 1431 bp, Arabidopsis thaliana
  CDS (1)..(1431)
atggtcgttcagaatgttcaagatttggatgttcttccgaaacatagctcggattcattcgatgatgatggtcgtcccaagcgaaccgggacggtgtggacagcaagtgcacacataataacagcagtaattgggtcaggagtgttgtcattggcatgggccgttgctcagattggttggattggtggtccagtggctatgttactcttttctttcgttactttttacacatctacccttctctgttcttgttaccgatctggtgactctgttaccggcaaaagaaactacacttacatggacgctattcactccaacctcggtgggattaaggtgaaagtatgtggagttgtgcaatatgttaatctatttggtacagcaattggatatacaattgcatcagctataagtttggtgacaagttgccaacagatgaatggaccaaatgatccttgtcatgttaatggaaatgtttacatgattgcgtttggtattgtacaaatcatattctctcagattcctgattttgatcagttatggtggctttccattgtcgctgcggtcatgtcttttgcttattctgccattggacttggccttggtgtctctaaagtggtagagaacaaagaaattaaaggtagtctcactggagtcactgttgggacagtgacactgagtgggacagtgacatcgtcgcagaaaatatggagaacatttcagtctcttggcaacattgcgtttgcgtactcttactcgatgattctcatcgaaattcaggacacggtgaaatcaccgcctgccgaagtaaacacgatgagaaaagcgacttttgtaagtgtggcagtgactacagtcttctacatgctatgtggctgtgtagggtatgcagcatttggggataacgcacccggaaatctcctcgctcatggagggtttagaaacccatattggttgcttgacattgctaatctcgctatagtgatccatctagtcggtgcttaccaagtctattgccaacccctctttgccttcgtcgagaaggaagcctctaggaggtttccagagagcgaattcgtcacaaaagagatcaagatccaactcttcccggggaagccctttaacttgaatctcttcaggctcgtatggaggacgttcttcgtgatgacaacaacgttgatctcaatgttaatgcctttctttaacgatgtagtcggtctcttgggggccattggtttttggcctttaacggtttatttcccagtggaaatgtacattgcacagaagaatgttccgagatggggcacaaagtgggtttgtctacaagtcttgagtgtgacatgtctttttgtgtccgtagccgcggccgcgggatctgttattggcattgttagtgatctcaaggtctacaaacctttccagtctgaattctga

SEQ ID NO: 633 - protein, 476 aa, Arabidopsis thaliana
MVVQNVQDLDVLPKHSSDSFDDDGRPKRTGTVWTASAHIITAVIGSGVLSLAWAVAQIGWIGGPVAMLLFSFVTFYTSTLLCSCYRSGDSVTGKRNYTYMDAIHSNLGGIKVKVCGVVQYVNLFGTAIGYTIASAISLVTSCQQMNGPNDPCHVNGNVYMIAFGIVQIIFSQIPDFDQLWWLSIVAAVMSFAYSAIGLGLGVSKVVENKEIKGSLTGVTVGTVTLSGTVTSSQKIWRTFQSLGNIAFAYSYSMILIEIQDTVKSPPAEVNTMRKATFVSVAVTTVFYMLCGCVGYAAFGDNAPGNLLAHGGFRNPYWLLDIANLAIVIHLVGAYQVYCQPLFAFVEKEASRRFPESEFVTKEIKIQLFPGKPFNLNLFRLVWRTFFVMTTTLISMLMPFFNDVVGLLGAIGFWPLTVYFPVEMYIAQKNVPRWGTKWVCLQVLSVTCLFVSVAAAAGSVIGIVSDLKVYKPFQSEF

SEQ ID NO: 634 - DNA, 1530 bp, Vicia faba
  CDS (1)..(1530)
atgttgcaacgaagtagaactcttcctagcaaaatctaccaaggagttattgaagagaggaaagatggcagacactacatagaactggaaccactgcctaaaatggaaactgagactaaaccaatcaccattcagtctaagtgcctcgatgacgatggtcgcgtcaagagaacaggaacattttggacagcttcggctcatatcatcactgctgtgataggctcgggagttctttcgttgtcatgggcaatagctcagcttggttgggctgttggacctgtagttatggttctgtttgcggtcgtcaatctctatacttccactttactaacacagtgttatagaagtgatgattctgttgctggaccgagaaattacacctacacggatgcagtaaagtctatcttaggagggaagaagtttaaaatttgtggtgtgattcaatatgtgaatctatttggtgttgcaattggatacactattgcagcctcagttagtatgatggccataaaaaggtcaaattgttaccatgagagtcatggaaatgatccatgtcatatgtcaagcaatgtgtacatgatagcatttggtatagcagaagtgatactttctcagatcccagactttgatcaagtatggtggctatcgatagttgcagctatcatgtccttcacttattctgcagttggattgggtctaggcgtggccaaagtagcagaaaatggaacttttcatggacgcttgatgggaattagtattggtacagtgacaccagctggaaccgtcactggcacacaaaaagtatggaggagtttacaagctttaggagcaatggcttttgcatactccttttcaattatcctcattgaaattcaggacactataaaatctcctcctgctgagcacaagaccatgaaaaaggccactatgttgagcatcatggttactacagttttttatattctctgtggaagcatgggttatgctgcttttggagatcatgtacctggaaatctcttgactggttttggattctataacccttattggcttcttgacattgccaactttgcaattgttgtgcaccttgtcggagcataccaggtattttcccagcccttctttgcatttgttgagaagtggagtgcacataagtggccaaaaaacaaatttgtgacagaagaatatgatataccaattccctgcattggagtgtacaaactcaacttgttccgcttaatatggaggactatttttgtgctgttgacaaccctcatagccatgctattaccatttttcaatgatgtagttggattacttggagcttttggattctggcccttaacagtttatttcccaatagatatgtacatctcacagaaaaagattggaagatggactaataggtggcttgggcttcagatgcttagtggatgttgcctcatcatttcaacattggctgctgttggctccattgcaggggttgttttagacctcaagacttataaaccattcaaaactagttattaa

SEQ ID NO: 635 - protein, 509 aa, Vicia faba
MLQRSRTLPSKIYQGVIEERKDGRHYIELEPLPKMETETKPITIQSKCLDDDGRVKRTGTFWTASAHIITAVIGSGVLSLSWAIAQLGWAVGPVVMVLFAVVNLYTSTLLTQCYRSDDSVAGPRNYTYTDAVKSILGGKKFKICGVIQYVNLFGVAIGYTIAASVSMMAIKRSNCYHESHGNDPCHMSSNVYMIAFGIAEVILSQIPDFDQVWWLSIVAAIMSFTYSAVGLGLGVAKVAENGTFHGRLMGISIGTVTPAGTVTGTQKVWRSLQALGAMAFAYSFSIILIEIQDTIKSPPAEHKTMKKATMLSIMVTTVFYILCGSMGYAAFGDHVPGNLLTGFGFYNPYWLLDIANFAIVVHLVGAYQVFSQPFFAFVEKWSAHKWPKNKFVTEEYDIPIPCIGVYKLNLFRLIWRTIFVLLTTLIAMLLPFFNDVVGLLGAFGFWPLTVYFPIDMYISQKKIGRWTNRWLGLQMLSGCCLIISTLAAVGSIAGVVLDLKTYKPFKTSY

SEQ ID NO: 636 - DNA, 1401 bp, Ricinus communis
  CDS (1)..(1401)
atgcctcctcaagctggctccaagtggtatgatgacgatggcaaactcaagcggactggaactgtttggactgctagtgctcacataattacagctgtgattgggtctggagttctgtctttggcttgggctgttgctcagcttggatgggttgctggtcctgctgttatgttcttgttctctttagtcacttactatacttctactctgctctccgcttgctaccgaactggtgatcctgtcaatggcaagaggaactatacttatatggacgctgttcggtccaatcttggtggtgctaagtttaagatatgtggatatgttcaatacgtgaatcttattggcgttgccattggttacacaatagcatcatctatcagtatgatggctgtcaagaggtctaattgtttccataagagtgaggcaaaaaatccatgccatatgaaatgccaatccttacatgattgcattttggaggttgttgaatcatcttcttctcagattcctgactttgatcaaactatgggtggcctatccattgttgctgcaatcatgtcctttacttactcaacaattggtcttggactaggaattgctgaagttacaaaaaatgggaaagccatgggaagtatgaccggtattagcattggaactgtgactgaaacacaaaagatatggaggagcttccaagctcttggtgacattgcttttgcctactcttattcccttatcctcattgaaattcaggacacgatcagatctccaccagcagagtccaaaacaatgaggaaagcaactctaataagtgtatcagtaacaacccttttctacatgctatgtggttgctttggctatgctgcctttggagacatgtctccgggaaatctcttaactggtttcggtttttacaacccatattggctactagacattgctaacgttgcaatagtagtccaccttgttggtgcataccaagtctactgccaacccttgttcgcattcgtcgaaaaagcagcagtacaaagattcccggacagtgaattcatacttaaagatattaaaatcccgattcctggatgcaaaccctacaatcttaacctcttcagaatggtatggaggactgtttttgtgatcttcacaaccgtaatttcgatgctccttcctttcttcaatgacatagttggtctacttggagctctaggattttggccattaaccgtttatttcccagttgagatgtacatagctcaaaagaagataccaaagtggagcacaagatggctttgcctccaaatactaagtgctgcttgtcttattatcactatagctgcagctgctggctcaattgcaggagttattgttgatctcaagacagtcaaaccattccagactacttactag

SEQ ID NO: 637 - protein, 466 aa, Ricinus communis
MPPQAGSKWYDDDGKLKRTGTVWTASAHIITAVIGSGVLSLAWAVAQLGWVAGPAVMFLFSLVTYYTSTLLSACYRTGDPVNGKRNYTYMDAVRSNLGGAKFKICGYVQYVNLIGVAIGYTIASSISMMAVKRSNCFHKSEAKNPCHMKCQSLHDCILEVVESSSSQIPDFDQTMGGLSIVAAIMSFTYSTIGLGLGIAEVTKNGKAMGSMTGISIGTVTETQKIWRSFQALGDIAFAYSYSLILIEIQDTIRSPPAESKTMRKATLISVSVTTLFYMLCGCFGYAAFGDMSPGNLLTGFGFYNPYWLLDIANVAIVVHLVGAYQVYCQPLFAFVEKAAVQRFPDSEFILKDIKIPIPGCKPYNLNLFRMVWRTVFVIFTTVISMLLPFFNDIVGLLGALGFWPLTVYFPVEMYIAQKKIPKWSTRWLCLQILSAACLIITIAAAAGSIAGVIVDLKTVKPFQTTY

SEQ ID NO: 638 - DNA, 1464 bp, Brassica napus
  CDS (1)..(1464)
atgggtgaaaccgctgccgccaacaaccaccaccaccatcacggccaccaagtctttgacgcgtccgtccctcaacaaccagctttcaaatgctttgacgatgatggccgtctcaaaagaacagggactgtttggaccgcaagcgctcatatcataacagcagtgatcggatcaggcgttctctcattggcatgggccattgcacagctcggatggatcgctggacctgcggtgatgctattgttctctttagttactctatactcttcaacacttctcagcgactgctacagaaccggagacgcagtctccggcaagagaaactacacttacatggacgcagtccgatccattctcggtggattcaagttcaagaaatgtgggctgattcaatacttgaatctctttggtattgccgtcggttacacaatcgcagcatccataagcatgatggcgatcaagagatcgaactgtttccacaagagcggaggaaaagacccgtgtcacatgtcgagcaacccttacatgatcatcttcggtgtgacagagatcttgctctcccaggttcctgatttcgaccagatttggtggatatccattgtagcagctgtcatgtccttcacttactctgccattggtctatctctcggcattgttcaagttgctgcaaatggagtattcaaaggaagtctaacagggataagcataggagcagtgactcaaacacagaagatatggagaacatttcaagctcttggagacattgcctttgcttactcttactctgttgtcctaattgagattcaggatactgtaagatcaccgccatcagaatcaaaaacgatgaagaaagctacaaaactcagcattgcaatcacaaccatcttctacatgctatgcggctcaatgggatacgcagcctttggagatgcagcaccaggaaacctcctcaccggtttcggattctacaacccgttttggctcctcgacatagccaacgcagccatcgtagtccacctcatcggagcttaccaagtcttctcccagcccatcttcgccttcgctgaaaaatcagcctcggagaggtttccagacaatgacttgctcaccaaggaactccaaatcaaaatcccagggttaaggtctccatacaaaacaaacgttttcagggtagtgttcaggtgctctttcgtcgttctaaccaccgtgatatcaatgctaatgccgttcttcaacgacgtggttgggatcttaggagccttagggttctggcccttgacggtttatttcccggtggagatgtatataaagcagaggaaggtggagaaatggagcacgaggtgggtttgtttacagatgcttagtgttgcttgtctagtgatctcggtggtcgccggagttggatcaatcgccggagtaatgcttgatcttaaggtctacaagcccttccagactacgtattga

SEQ ID NO: 639 - protein, 487 aa, Brassica napus
MGETAAANNHHHHHGHQVFDASVPQQPAFKCFDDDGRLKRTGTVWTASAHIITAVIGSGVLSLAWAIAQLGWIAGPAVMLLFSLVTLYSSTLLSDCYRTGDAVSGKRNYTYMDAVRSILGGFKFKKCGLIQYLNLFGIAVGYTIAASISMMAIKRSNCFHKSGGKDPCHMSSNPYMIIFGVTEILLSQVPDFDQIWWISIVAAVMSFTYSAIGLSLGIVQVAANGVFKGSLTGISIGAVTQTQKIWRTFQALGDIAFAYSYSVVLIEIQDTVRSPPSESKTMKKATKLSIAITTIFYMLCGSMGYAAFGDAAPGNLLTGFGFYNPFWLLDIANAAIVVHLIGAYQVFSQPIFAFAEKSASERFPDNDLLTKELQIKIPGLRSPYKTNVFRVVFRCSFVVLTTVISMLMPFFNDVVGILGALGFWPLTVYFPVEMYIKQRKVEKWSTRWVCLQMLSVACLVISVVAGVGSIAGVMLDLKVYKPFQTTY

SEQ ID NO: 640 - DNA, 1458 bp, Brassica napus
  CDS (1)..(1458)
atgaagagtttcaacaccgatcaacacggtcactccgcggcggaatccggcgacgtctacgccatgtccgatccaacaaagaacgttgatgacgatggccgagagaagaggacggggacgtggcttacggcgagtgcgcatattatcacggcggtaataggctcaggagtgttgtcgttggcatgggccatagctcagcttggttggatagcagggactttgattctgatcattttctcgtttatcacgtacttcacttctacgatgctcgctgattgctaccgtgcgccggatcccctcaccggaaaacgaaactacacttacatggacgttgttcgatcttacctcggtggtaggaaagtgcagctttgtggagtggcacagtatgggaatctgataggaatcactgttgggtacaccatcactgcttctattagtttggtagcgatcgggaaagcgaactgttaccacaataaagggcaccatgcagattgtacaatatcgaactatccatatatggcggccttcgggatcattcagatccttcttagccagatcccaaactttcacaagctctcttttctctcccttatggctgcggttatgtctttcgcttacgcaagtattgggattggcctagccatcgcgacggtcgcaggtgggaaagtgggtaagacgaatataacgggaacggtggtagaagttgatgtaaccgcgactcagaagatatggagatcgtttcaagcggttggagacatagcgtttgcatatgcttacgccaccgttctcattgagattcaggacacactgaaatctagcccagcagaaaacaaagctatgaaaagagcaagccttctgggagtatcaaccaccactttcttctacatattatgtggttgtctcggctatgctgcatttggaaacaaagcgcctggagatttcctcacagatttcgggttttacgagcccttttggctcattgactttgcaaacgcatgcattgctttccaccttatcggtgcttatcaggtgtttgcgcagcccatcttccagtttgttgagaagaaatgcaatagaaactggcctgacaacaagttcatcacttctgaatattcagtaaacatacctttccttggaaaatttaacatcagcctcttcagattggtgtggaggacagcttacgtggttataacaactttggtagctatgatattccctttcttcaacgccatcttgggtcttatcggagcagcttcgttctggcctttaacggtttatttccctgtcgagatgcatattgcacagactaaggttaagaagtactctcctagatggattgggctgaaaatgatgtgctgggtttgcctgatcgtatcactcttagctgctgctggatccatcgcaggactgataagtagtgtcaagacatacaagcctttccggactatccatgagtga

SEQ ID NO: 641 - protein, 485 aa, Brassica napus
MKSFNTDQHGHSAAESGDVYAMSDPTKNVDDDGREKRTGTWLTASAHIITAVIGSGVLSLAWAIAQLGWIAGTLILIIFSFITYFTSTMLADCYRAPDPLTGKRNYTYMDVVRSYLGGRKVQLCGVAQYGNLIGITVGYTITASISLVAIGKANCYHNKGHHADCTISNYPYMAAFGIIQILLSQIPNFHKLSFLSLMAAVMSFAYASIGIGLAIATVAGGKVGKTNITGTVVEVDVTATQKIWRSFQAVGDIAFAYAYATVLIEIQDTLKSSPAENKAMKRASLLGVSTTTFFYILCGCLGYAAFGNKAPGDFLTDFGFYEPFWLIDFANACIAFHLIGAYQVFAQPIFQFVEKKCNRNWPDNKFITSEYSVNIPFLGKFNISLFRLVWRTAYVVITTLVAMIFPFFNAILGLIGAASFWPLTVYFPVEMHIAQTKVKKYSPRWIGLKMMCWVCLIVSLLAAAGSIAGLISSVKTYKPFRTIHE

SEQ ID NO: 642 - DNA, 1386 bp, Glycine max
  CDS (1)..(1386)
atggctgttcaaaactctctccaaataactagaagtggtagtggtggttatgacgatgacgggcgtgctaaaaggactggaactttatggagtgctgtggctcatatcatcacagccattatcggtgctggtgttctgtctttagcttggagtacttcccaattgggatggattgcaggaccagtttgcttgcttttttgtgcaattgtcacctatgtttcttcattcctcctttccgattgttacagaactctggatcctgtaactgtgaaaagaaactactcttacatggatgctgttagagtctatcttggcaataagaggacatggttggctggttcccttcaatatttgagcttgtatggggttagtactgcttatgtaattaccacaacaacctgtttgagagcaatactgaaatcaaattgttatcacaaggaagggcatcaggctccttgtaaatatggggatgcagtatatatgatgctgtttggactagttcagatcataatgtcattcataccagatctccacaacatggcatgggtttcaattgttgcggccataatgtcctttacatactcatctattggacttggacttggaatcacaacagtaatagaaaatggaagaattatgggtagtttaacaggagtaccggcttcaaatattgctgacaagttatggttagtcttccaagcaattggtgatattgcctttgcctatccatacacagtcatcctccttgagatacaggacactctagagtctcctccaccagaaaacaagaccatgaaaaaggcctccatgattgctatcctcattacaacattcttctacctctgctgtggatgctttggatatgcggcttttggaaatcaaacaccaggaaacctcttgacagggtttggattttacgagccttactggctcattgactttgccaatgcttgcattgttcttcacttggtaggaggatatcagatttacagtcagccgatatatggtgctgttgacagatggtgttcaaaaagataccccaacagtggatttgtgaataatttctaccaattgaaactgcctcggttgccagcttttcagctaaacatgttcaggatatgttttagaacagcttatgtggtttccacgactggacttgcgatcctatttccttacttcaatcaagttataggagtgttaggagccttaggcttttggccattggctatatatttcccggtagagatgtactttgtgcagaggaaagttgaagcttggtctagaaaatggattgtcctcaggaccttcagctttatttgctttctggtgtcattactgggtctcattggatcacttgaaggaatcataagcgagaaactaagctaa

SEQ ID NO: 643 - protein, 461 aa, Glycine max
MAVQNSLQITRSGSGGYDDDGRAKRTGTLWSAVAHIITAIIGAGVLSLAWSTSQLGWIAGPVCLLFCAIVTYVSSFLLSDCYRTLDPVTVKRNYSYMDAVRVYLGNKRTWLAGSLQYLSLYGVSTAYVITTTTCLRAILKSNCYHKEGHQAPCKYGDAVYMMLFGLVQIIMSFIPDLHNMAWVSIVAAIMSFTYSSIGLGLGITTVIENGRIMGSLTGVPASNIADKLWLVFQAIGDIAFAYPYTVILLEIQDTLESPPPENKTMKKASMIAILITTFFYLCCGCFGYAAFGNQTPGNLLTGFGFYEPYWLIDFANACIVLHLVGGYQIYSQPIYGAVDRWCSKRYPNSGFVNNFYQLKLPRLPAFQLNMFRICFRTAYVVSTTGLAILFPYFNQVIGVLGALGFWPLAIYFPVEMYFVQRKVEAWSRKWIVLRTFSFICFLVSLLGLIGSLEGIISEKLS

SEQ ID NO: 644 - DNA, 1440 bp, Glycine max
  CDS (1)..(1440)
atgaattctgatcagtttcagaagaacagcatgttcgtagaaacccctgaagatggtggcaaaaacttcgacgatgatggacgagtcagaagaacgggtacatggataactgcgagtgcccatatcataacggcagtgatagggtcaggagtgttgtcacttgcatgggcaattgcacaaatgggttgggtggctggccctgccgttctctttgccttctctttcatcacttacttcacttccactcttcttgccgactgttatcgttcacctgatcctgttcatggcaagcgaaactacacctattccgatgttgtcagatccgtcttaggagggaggaaatttcagctgtgtggattagctcagtacataaatcttgtcggtgtaactatcggttacacgataacggcttcaattagtatggtggcggtgaagaggtcgaattgttttcacaaacatggtcatcatgttaagtgctatacgtcaaacaaccctttcatgatcctctttgcctgcattcaaatcgtgcttagccagataccaaatttccataagctctggtggctctccattgttgcagcagttatgtcttttgcttattcttccattggcctcgggctctcagtagctaaagtggcaggtggtggagagcctgtacggacaaccttaacgggggtgcaagttggggtagacgttacaggatccgagaaggtctggaggacgtttcaagctattggtgacattgccttcgcttacgcttattctaacgtgctcatcgagatacaggataccctgaaatcgagccctccagaaaacaaggtcatgaaaagagcaagtttgattggcatcttgactacaaccttgttctatgtgctatgtggctgcctaggttatgcagcatttggaaacgatgcaccaggaaatttcctcacagggttcggcttctacgagcccttttggctcatagactttgctaacatctgcatagccgtgcacttggttggagcatatcaggtcttctgtcagcccatatttgggttcgtagagaactggggtaaggaaaggtggccaaatagccaatttgtaaatggagaacacgctttgaactttccactatgtggaaccttccctgtgaacttcttcagggtggtgtggagaacaacatatgtcatcatcactgctttgatagctatgatgtttccattcttcaatgacttcctaggcctgattggttcactgtccttttggccattaaccgtttacttccccatagaaatgtacattaagcagtcaaagatgcaaaggttttccttcacgtggacatggctcaagatactgagctgggcttgcttgatcgtttctattatctcagctgctggttccatccaaggcctcgctcaagatctcaagaaatatcagcccttcaaagcccagcaataa

SEQ ID NO: 645 - protein, 479 aa, Glycine max; identical to SEQ ID NO: 515

SEQ ID NO: 646 - DNA, 1440 bp, Glycine max
  CDS (1)..(1440)
atgaattctgatcagtttcagaagaacagcatgttcgtagaaacccctgaagatggtggcaaaaacttcgacgatgatggacgagtcagaagaactggtacatggataactgcgagtgcccatatcataacggcagtgataggttctggagtgttgtcacttgcatgggcaattgcacaaatgggttgggtggcaggccctgcggttctctttgccttctctttcatcacatacttcacttccactcttcttgccgactgttatcgttcacctgatcctgttcatggcaagcgaaactacacctattcagatgttgtcagatccgtcttaggaggtaggaaatttcagctgtgtggattagctcagtacataaatcttgtcggtgtaactatcggttacacgataacggcttcaattagtatggtggcggtgaagaggtccaactgttttcacaaacatggtcatcatgataagtgctacacgtcaaacaaccctttcatgatcctctttgcctgcattcaaatcgtgcttagccaaataccaaatttccataagctctggtggctctccattgttgcagcagttatgtcttttgcttattcttccattggcctcgggctctcagtagctaaagtggcaggtggtggagaacctgtacggacaaccttaacgggggtgcaagttggggtggacgttacgggatccgagaaggtctggaggacgtttcaagctattggtgatattgccttcgcttacgcttattctaacgtgctcattgagatacaggataccctgaaatcgagccctccagaaaacaaggtcatgaaaagagcaagtttgattggcatcttgactacaaccttgttctatgtgctatgtggctgcctaggttatgcagcatttggaaacgatgcaccaggaaatttcctcacagggttcggcttctacgagcccttttggctcatagactttgctaacatctgcatagccgtacacttggttggagcatatcaggtcttctgtcagcccatatttgggttcgtagagaactggggtaaggaaaggtggccaaatagccaatttgtaaatggagaacacgctttgaactttccactatgtggaaccttccctgtgaacttcttcagggtggtgtggagaacaacatatgtcatcatcactgctttgatagctatgatgtttccattcttcaatgacttcctaggcctgattggttcactgtcattttggccattaacggtttacttccccatagagatgtacattaagcagtcaaagatgcaaaagttttccttcacttggacatggctcaagatattgagctgggcttgcttgatcgtttctattatctcagctgctggctccatccaaggcctcgctcaagatctcaagaaatatcagcccttcaaagcccagcaataa

SEQ ID NO: 647 - protein, 479 aa, Glycine max
MNSDQFQKNSMFVETPEDGGKNFDDDGRVRRTGTWITASAHIITAVIGSGVLSLAWAIAQMGWVAGPAVLFAFSFITYFTSTLLADCYRSPDPVHGKRNYTYSDVVRSVLGGRKFQLCGLAQYINLVGVTIGYTITASISMVAVKRSNCFHKHGHHDKCYTSNNPFMILFACIQIVLSQIPNFHKLWWLSIVAAVMSFAYSSIGLGLSVAKVAGGGEPVRTTLTGVQVGVDVTGSEKVWRTFQAIGDIAFAYAYSNVLIEIQDTLKSSPPENKVMKRASLIGILTTTLFYVLCGCLGYAAFGNDAPGNFLTGFGFYEPFWLIDFANICIAVHLVGAYQVFCQPIFGFVENWGKERWPNSQFVNGEHALNFPLCGTFPVNFFRVVWRTTYVIITALIAMMFPFFNDFLGLIGSLSFWPLTVYFPIEMYIKQSKMQKFSFTWTWLKILSWACLIVSIISAAGSIQGLAQDLKKYQPFKAQQ

SEQ ID NO: 648 - DNA, 1464 bp, Triticum aestivum
  CDS (1)..(1464)
atggagaagaagcaggcgagctacgggaagggcgcggccaggatggcgccgatggaggtgtcggtggaggccgggaacggcagggagtccgactggcttgacgacgacgggcgcccgcgtcggtcgggcacggtgtggacggcgagcgcccacatcatcaccgccgtcatcggctcgggcgtcctctcgctggcgtgggccatcgcccagctcggctgggtggcgggccccgccatcatgctcctgttcgcgctcgtcatctactacacctccacgctcctcgccgagtgctaccgctccggcgacccggagaccggcaagcgcaactacacctacatggacgccgtccgctcctacctcccgggcaccaaggtgaagctctgcggcgtcatccagtacgccaacctcgtcggcgtcgccatcggctacaccatcgccgcctccatcagcatgcgggcgatcgggagggcggactgcttccactaccacgacgtcaggggccgcagcgggaaggacgagtgcaagagctccagcaacccgtacatgatcgtcttcggggtggtgcagatcctcttctcgcagataccggacttcgaccagatatggtggctctccatcgtcgccgccgtcatgtccttcacctactccaccatcgggctcgggctcggcatcgcgcagaccgtcgccaacggtggcatccagggaagcctcaccggcctcagcgtcggcccgggcgtgacctccatgcagaaggtgtggcgcagcctccaggccttcggcaacatcgccttcgcctactcctactccatcatcctcatcgaaatccaggacacggtgaaggcgccgccgccgtcggaggcgaaggtgatgaagaaggcgacggggataagcgtggcgacgacgacggtgttctacatgctgtgcgggtgcatggggtacgcggcgttcggcgacgcagcccccgacaacctcctcaccgggttcggattctacgagcccttctggctgctggacatcgccaacgtggccatcgtcgtgcacctcgtcggcgcctaccaggtcttctgccagcccatcttcgccttcgtcgagcgctgggccgcgtccacatggccagacagcgccttcatctcccgcgagttccgggtggggccattcgcgctcagcgtgttccggctgacgtggcggtcggccttcgtctgcctcaccaccgtcttcgccatgctgctcccgttcttcggcaacgtggtgggactcctcggcgccgtctccttctggccgctcaccgtctacttccccgtcgagatgtacatcaggcagcgcggcgtgcccggccggagcatgcaggggatctgccttaggatgctcagcgtcggatgcctcatcgtttccatcgccgccgcggcgggctccatcgccaacgtcatcgaagctctcaaagtgtacaagccgttcagcggctga

SEQ ID NO: 649 - protein, 487 aa, Triticum aestivum
MEKKQASYGKGAARMAPMEVSVEAGNGRESDWLDDDGRPRRSGTVWTASAHIITAVIGSGVLSLAWAIAQLGWVAGPAIMLLFALVIYYTSTLLAECYRSGDPETGKRNYTYMDAVRSYLPGTKVKLCGVIQYANLVGVAIGYTIAASISMRAIGRADCFHYHDVRGRSGKDECKSSSNPYMIVFGVVQILFSQIPDFDQIWWLSIVAAVMSFTYSTIGLGLGIAQTVANGGIQGSLTGLSVGPGVTSMQKVWRSLQAFGNIAFAYSYSIILIEIQDTVKAPPPSEAKVMKKATGISVATTTVFYMLCGCMGYAAFGDAAPDNLLTGFGFYEPFWLLDIANVAIVVHLVGAYQVFCQPIFAFVERWAASTWPDSAFISREFRVGPFALSVFRLTWRSAFVCLTTVFAMLLPFFGNVVGLLGAVSFWPLTVYFPVEMYIRQRGVPGRSMQGICLRMLSVGCLIVSIAAAAGSIANVIEALKVYKPFSG

SEQ ID NO: 650 - DNA, 1416 bp, Glycine max
  CDS (1)..(1416)
atggatattgaagcaggtaaagatattcctgtaagagacccagcgctactcgatgacgacggcagaatcaaaagaaccgggaacgtgttcactgctaccacgcacatagtaacggtggtggtgggtgcaggagtgctggctctggcatgggccatggctcagcttggatggatagctggcatagccgttatgatcctctttgcatgcatttctgtttacacttacaatcttgtagctgattgctacagatttcctgacccagtcagtggcaagagaaactacacttacatgcaggccgttgatgcctaccttggtggaaaaatgcacgtgttctgcggatccgtcctatatgggaagctcgccggggttacagtgggctacactataactagttctgtgagcttggtggctataaagaaagctatttgctttcacaaaaaaggccatgatgcttattgcaagttttcaaacaatccctatatgattggttttgggatttgccaaattttattgtctcaaatcccaaatttccacaagttaacgtggctttcaaccattgctgctgctacctctttcggttatgcattcattggaagcgggctttctctttcggtggtggtctcaggtaaaggagaagcaaccagtatatttggaagcaaagtaggaccagatttatctgaagcggataaagtttggaaggttttcagtgctttgggaaacattgcacttgcttgctcatttgctactgttatttatgacataatggatacattgaagtcctatccaccagaaaacaaacagatgaaaaaggccaatatgttaggaatcacaacaatgacaatacttttcctgctatgcggtggccttggctatgctgctttcggagatgacacgccggggaacatcctcaccggctttggattttacgagccattctggttggtcgcccttggcaatgttttcattgtagtccacatggttggagcatatcaggtgatggctcaaccactatttcgtgtaattgagatgggtgctaacatggcgtggccgcgttcagatttcattaacaagagctatcccatcaaaatgggctccttaacatgtaacatcaacttgtttaggataatttggaggtcaatgtatgtggcagtggccacagttattgccatggctatgccatttttcaatgagtttcttgccttgcttggagcaatagggttttggcctctcattgtcttcttccctgtacaaatgcacattgcacagaaacgggtaaaaagactatcattgaagtggtgttgtcttcaaatattgagcttcgcgtgcttcctagttacagtttccgcggcagttggttcggttcgtggaattagcaagaatataaaaaaatacaaacttttccagtataaacaatag

SEQ ID NO: 651 - protein, 471 aa, Glycine max; identical to SEQ ID NO: 517

SEQ ID NO: 652 - DNA, 1440 bp, Zea mays
  CDS (1)..(1440)
atggcggtaggcaacggcggcgccaagaaagtggtggcgcccatggaggtgtccgtggaggccgggaacggcggagccgccgagtggctggacgacgacggccggcctcgccgcacgggcacgttctggacggccagcgcgcacatcatcaccgccgtcatcggctccggcgtgctgtccctggcctgggccatcgcgcagctgggctgggtcgccggccccgccgccatgctcctcttcgccttcgtcacctactacaccgccacgctgctcgccgagtgctaccgcacgggcgacccggacacgggcaagcgcaactacacctacatggacgccgtgcgctccaacctcggcggcgccaaggtcgccttctgcggcgtcatccagtacgccaacctcgtcggcgtcgccatcggctacaccatcgcgtcgtccatcagcatgaaggccgtcaggagggccgggtgcttccacacccacgggcacgccgacccctgcaagagctccagcaccccctacatgatcctcttcggcgccgtgcagatcctcttctcccagatacccgacttcgaccagatttggtggctctccattgtcgccgcagtcatgtccttcacttactcctccatcggactctccctcggcatcgcacagaccgtctccaacggtgggttcaagggcagcctcaccggcatcagcatcggcgccggcgtcacctccacgcagaagatctggcacacgctgcaggccttcggcgacatcgcgttcgcctactccttctccaacatcctcatcgagatccaagacacgatcaaggcgccgccaccgtcggagtcgaaggtgatgcagaaggcgacgcgcctcagcgtggcgacgacgaccatcttctacatgctgtgcgggtgcatggggtacgcggcgttcggcgacaaggcgccggacaacctgctcaccggcttcggcttcttcgagccattctggctgatcgacgtggccaacgtggccatcgtggtgcacctggtgggcgcgtaccaggtgttctgccagcccatcttcgccttcgtcgagcgccgcgccgccgcggcctggcccgacagcgccttcgtctcgcgggagctccgcgtgggccccttcgccctcagcgtgttccgcctcacgtggcggtcggcgttcgtgtgcgtcaccaccgtcgtcgccatgctgctgccgttcttcggcaacgtggtggggttcctcggcgccgtctccttctggccgctcaccgtctacttccccgtcgagatgtacatcaagcagcgccgcgtgccccgcggcagcaccaagtggatctgcctccagacgctcagcgtcacgtgcctcctcgtctccatcgccgccgccgccggctccatcgccgacgtcatcgaggcgctcaaggtttaccacccgttcagcagttaa

SEQ ID NO: 653 - protein, 479 aa, Zea mays
MAVGNGGAKKVVAPMEVSVEAGNGGAAEWLDDDGRPRRTGTFWTASAHIITAVIGSGVLSLAWAIAQLGWVAGPAAMLLFAFVTYYTATLLAECYRTGDPDTGKRNYTYMDAVRSNLGGAKVAFCGVIQYANLVGVAIGYTIASSISMKAVRRAGCFHTHGHADPCKSSSTPYMILFGAVQILFSQIPDFDQIWWLSIVAAVMSFTYSSIGLSLGIAQTVSNGGFKGSLTGISIGAGVTSTQKIWHTLQAFGDIAFAYSFSNILIEIQDTIKAPPPSESKVMQKATRLSVATTTIFYMLCGCMGYAAFGDKAPDNLLTGFGFFEPFWLIDVANVAIVVHLVGAYQVFCQPIFAFVERRAAAAWPDSAFVSRELRVGPFALSVFRLTWRSAFVCVTTVVAMLLPFFGNVVGFLGAVSFWPLTVYFPVEMYIKQRRVPRGSTKWICLQTLSVTCLLVSIAAAAGSIADVIEALKVYHPFSS

SEQ ID NO: 654 - DNA, 29 bp, Artificial sequence
  primer
atagagctcccgtgtcggacccgacaaag

SEQ ID NO: 655 - DNA, 31 bp, Artificial sequence
  primer
atacccgggctgaataatgccaaaaaccgcc

SEQ ID NO: 656 - DNA, 22 bp, Artificial sequence
  primer
atgaagagtttcaacacagaag

SEQ ID NO: 657 - DNA, 22 bp, Artificial sequence
  primer
tcactcatgcatagtccggaag

SEQ ID NO: 658 - DNA, 29 bp, Artificial sequence
  primer
ataccatggccgtgtcggacccgacaaag

SEQ ID NO: 659 - DNA, 33 bp, Artificial sequence
  primer
atattaattaactgaataatgccaaaaaccgcc

SEQ ID NO: 660 - DNA, 29 bp, Artificial sequence
  primer
ataggatccccgtgtcggacccgacaaag

SEQ ID NO: 661 - DNA, 31 bp, Artificial sequence
  primer
atagtcgacctgaataatgccaaaaaccgcc

SEQ ID NO: 662 - protein, 480 aa, Artificial sequence
  consensus sequence
  Variant (5)..(7): Xaa in position 5 to 7 is any amino acid
  Variant (12)..(13): Xaa in position 12 to 13 is any amino acid
  Variant (16)..(16): Xaa in position 16 is any amino acid
  Variant (35)..(35): Xaa in position 35 is any amino acid
  Variant (41)..(42): Xaa in position 41 to 42 is any amino acid
  Variant (45)..(49): Xaa in position 45 to 49 is any amino acid
  Variant (51)..(53): Xaa in position 51 to 53 is any amino acid
  Variant (55)..(57): Xaa in position 55 to 57 is any amino acid
  Variant (59)..(59): Xaa in position 59 is any amino acid
  Variant (62)..(63): Xaa in position 62 to 63 is any amino acid
  Variant (67)..(68): Xaa in position 67 to 68 is any amino acid
  Variant (69)..(69): Xaa in position 69 is any or no amino acid
  Variant (71)..(72): Xaa in position 71 to 72 is any amino acid
  Variant (73)..(73): Xaa in position 73 is any or no amino acid
  Variant (82)..(83): Xaa in position 82 to 83 is any amino acid
  Variant (85)..(87): Xaa in position 85 to 87 is any amino acid
  Variant (90)..(91): Xaa in position 90 to 91 is any amino acid
  Variant (93)..(97): Xaa in position 93 to 97 is any amino acid
  Variant (100)..(101): Xaa in position 100 to 101 is any amino acid
  Variant (104)..(104): Xaa in position 104 is any amino acid
  Variant (107)..(107): Xaa in position 107 is any amino acid
  Variant (109)..(111): Xaa in position 109 to 111 is any amino acid
  Variant (116)..(118): Xaa in position 116 to 118 is any amino acid
  Variant (121)..(122): Xaa in position 121 to 122 is any amino acid
  Variant (124)..(125): Xaa in position 124 to 125 is any amino acid
  Variant (126)..(128): Xaa in position 126 to 128 is any or no amino acid
  Variant (130)..(130): Xaa in position 130 is any amino acid
  Variant (132)..(133): Xaa in position 132 to 133 is any amino acid
  Variant (135)..(138): Xaa in position 135 to 138 is any amino acid
  Variant (139)..(143): Xaa in position 139 to 143 is any or no amino acid
  Variant (145)..(150): Xaa in position 145 to 150 is any amino acid
  Variant (151)..(152): Xaa in position 151 to 152 is any or no amino acid
  Variant (155)..(156): Xaa in position 155 to 156 is any amino acid
  Variant (159)..(164): Xaa in position 159 to 164 is any amino acid
  Variant (167)..(167): Xaa in position 167 is any amino acid
  Variant (169)..(169): Xaa in position 169 is any amino acid
  Variant (171)..(174): Xaa in position 171 to 174 is any amino acid
  Variant (175)..(175): Xaa in position 175 is any or no amino acid
  Variant (180)..(180): Xaa in position 180 is any amino acid
  Variant (183)..(183): Xaa in position 183 is any amino acid
  Variant (187)..(187): Xaa in position 187 is any amino acid
  Variant (190)..(190): Xaa in position 190 is any amino acid
  Variant (193)..(194): Xaa in position 193 to 194 is any amino acid
  Variant (196)..(207): Xaa in position 196 to 207 is any amino acid
  Variant (208)..(211): Xaa in position 208 to 211 is any or no amino acid
  Variant (214)..(215): Xaa in position 214 to 215 is any amino acid
  Variant (216)..(216): Xaa in position 216 is any or no amino acid
  Variant (218)..(218): Xaa in position 218 is any amino acid
  Variant (219)..(225): Xaa in position 219 to 225 is any or no amino acid
  Variant (227)..(230): Xaa in position 227 to 230 is any amino acid
  Variant (232)..(232): Xaa in position 232 is any amino acid
  Variant (234)..(236): Xaa in position 234 to 236 is any amino acid
  Variant (239)..(239): Xaa in position 239 is any amino acid
  Variant (241)..(241): Xaa in position 241 is any amino acid
  Variant (247)..(248): Xaa in position 247 to 248 is any amino acid
  Variant (250)..(251): Xaa in position 250 to 251 is any amino acid
  Variant (259)..(262): Xaa in position 259 to 262 is any amino acid
  Variant (263)..(264): Xaa in position 263 to 264 is any or no amino acid
  Variant (266)..(266): Xaa in position 266 is any amino acid
  Variant (267)..(267): Xaa in position 267 is any or no amino acid
  Variant (269)..(269): Xaa in position 269 is any amino acid
  Variant (271)..(271): Xaa in position 271 is any amino acid
  Variant (273)..(274): Xaa in position 273 to 274 is any amino acid
  Variant (276)..(282): Xaa in position 276 to 282 is any amino acid
  Variant (285)..(285): Xaa in position 285 is any amino acid
  Variant (288)..(288): Xaa in position 288 is any amino acid
  Variant (293)..(293): Xaa in position 293 is any amino acid
  Variant (300)..(302): Xaa in position 300 to 302 is any amino acid
  Variant (306)..(306): Xaa in position 306 is any amino acid
  Variant (314)..(314): Xaa in position 314 is any amino acid
  Variant (316)..(316): Xaa in position 316 is any amino acid
  Variant (319)..(319): Xaa in position 319 is any amino acid
  Variant (321)..(321): Xaa in position 321 is any amino acid
  Variant (324)..(325): Xaa in position 324 to 325 is any amino acid
  Variant (327)..(328): Xaa in position 327 to 328 is any amino acid
  Variant (331)..(331): Xaa in position 331 is any amino acid
  Variant (337)..(338): Xaa in position 337 to 338 is any amino acid
  Variant (341)..(341): Xaa in position 341 is any amino acid
  Variant (343)..(343): Xaa in position 343 is any amino acid
  Variant (345)..(345): Xaa in position 345 is any amino acid
  Variant (347)..(353): Xaa in position 347 to 353 is any amino acid
  Variant (354)..(354): Xaa in position 354 is any or no amino acid
  Variant (356)..(368): Xaa in position 356 to 368 is any amino acid
  Variant (369)..(385): Xaa in position 369 to 385 is any or no amino acid
  Variant (388)..(389): Xaa in position 388 to 389 is any amino acid
  Variant (392)..(394): Xaa in position 392 to 394 is any amino acid
  Variant (396)..(397): Xaa in position 396 to 397 is any amino acid
  Variant (400)..(402): Xaa in position 400 to 402 is any amino acid
  Variant (404)..(405): Xaa in position 404 to 405 is any amino acid
  Variant (410)..(412): Xaa in position 410 to 412 is any amino acid
  Variant (414)..(415): Xaa in position 414 to 415 is any amino acid
  Variant (418)..(419): Xaa in position 418 to 419 is any amino acid
  Variant (434)..(434): Xaa in position 434 is any amino acid
  Variant (436)..(441): Xaa in position 436 to 441 is any amino acid
  Variant (443)..(443): Xaa in position 443 is any amino acid
  Variant (444)..(444): Xaa in position 444 is any or no amino acid
  Variant (446)..(447): Xaa in position 446 to 447 is any amino acid
  Variant (449)..(450): Xaa in position 449 to 450 is any amino acid
  Variant (453)..(454): Xaa in position 453 to 454 is any amino acid
  Variant (457)..(464): Xaa in position 457 to 464 is any amino acid
  Variant (467)..(468): Xaa in position 467 to 468 is any amino acid
  Variant (470)..(472): Xaa in position 470 to 472 is any amino acid
  Variant (473)..(478): Xaa in position 473 to 478 is any or no amino acid
DDDGXXXRTGTXXTAXAHIITAVIGSGVLSLAWAXAQLGWXXGPXXXXXFXXXTXXXSXLLXXCYRXXXDXXXGKRNYTYMXXVXXXLGXXGXXXXXCGXXQYXNLXGXXXGYTIXXXISXXAXXXXXCXHXXGXXXXXXXXXCXXXXXXXXYMXXFGXXXXXXSQXPXFXXXXXWLSIXAAXMSFXYSXIGXXLXXXXXXXXXXXXXXXXTGXXXGXXXXXXXXVXXXXKXWXXXQAXGXIAFAYXXSXXLIEIQDTXXXXXXPXXEXKXMXXAXXXXXXXTTXFYXLCGCXGYAAFGXXXPGNXLTGFGFYXPXWLXDXANXXIXXHLXGAYQVXXQPXFXFXEXXXXXXXXPXXXXXXXXXXXXXXXXXXXXXXXXXXXXXXFRXXWRXXXVXXTTXXXMXXPFFNXXXGXXGAXXFWPLTVYFPVEMYIXQXXXXXXSXXWXXLXXLSXXCLXXXXXXXXGSXXGXXXXXXXXXPF

SEQ ID NO: 663 - protein, 33 aa, Artificial sequence
  protein pattern
  Variant (2)..(2): Xaa in position 2 is Phe or Tyr
  Variant (5)..(5): Xaa in position 5 is Ile, Leu or Val
  Variant (6)..(6): Xaa in position 6 is Ala, Asp or Gly
  Variant (7)..(7): Xaa in position 7 is any amino acid
  Variant (8)..(8): Xaa in position 8 is Ala or Gly
  Variant (10)..(11): Xaa in position 10 to 11 is any amino acid
  Variant (13)..(13): Xaa in position 13 is any or no amino acid
  Variant (15)..(15): Xaa in position 15 is any or no amino acid
  Variant (17)..(17): Xaa in position 17 is Leu or Met
  Variant (18)..(18): Xaa in position 18 is Ile or Val
  Variant (20)..(20): Xaa in position 20 is Ala, Gly or Ser
  Variant (21)..(21): Xaa in position 21 is Phe or Tyr
  Variant (24)..(24): Xaa in position 24 is any amino acid
  Variant (25)..(25): Xaa in position 25 is Ala, Cys, Ser or Val
  Variant (28)..(28): Xaa in position 28 is Phe, Ile, Leu or Val
  Variant (29)..(29): Xaa in position 29 is Phe or Tyr
  Variant (30)..(31): Xaa in position 30 to 31 is any amino acid
  Variant (32)..(32): Xaa in position 32 is Ala, Ile, Leu or Val
PXWLXXXXNXXIXVXHXXGXXQVXXQPXXXXXE

SEQ ID NO: 664 - protein, 56 aa, Artificial sequence
  protein pattern
  Variant (2)..(2): Xaa in position 2 is any amino acid
  Variant (3)..(4): Xaa in position 3 to 4 is any or no amino acid
  Variant (11)..(11): Xaa in position 11 is Ile or Val
  Variant (19)..(19): Xaa in position 19 is Ala, Gly or Ser
  Variant (21)..(21): Xaa in position 21 is Ala, Gly or Ser
  Variant (22)..(22): Xaa in position 22 is any amino acid
  Variant (23)..(23): Xaa in position 23 is Ala or Gly
  Variant (25)..(25): Xaa in position 25 is Ile, Leu or Met
  Variant (28)..(28): Xaa in position 28 is Ala, Ile, Leu or Val
  Variant (29)..(29): Xaa in position 29 is Ala, Gly, Ile or Val
  Variant (31)..(33): Xaa in position 31 to 33 is any amino acid
  Variant (34)..(34): Xaa in position 34 is Leu or Met
  Variant (35)..(36): Xaa in position 35 to 36 is any amino acid
  Variant (38)..(38): Xaa in position 38 is Ala, Gly or Ser
  Variant (39)..(39): Xaa in position 39 is any amino acid
  Variant (40)..(40): Xaa in position 40 is Ile or Val
  Variant (41)..(43): Xaa in position 41 to 43 is any amino acid
  Variant (44)..(44): Xaa in position 44 is Ala, Cys, Ser or Thr
  Variant (45)..(45): Xaa in position 45 is Ala, Cys or Ser
  Variant (46)..(46): Xaa in position 46 is any amino acid
  Variant (47)..(47): Xaa in position 47 is Phe, Leu or Met
  Variant (49)..(49): Xaa in position 49 is Ala, Cys, Ser, Thr or Val
  Variant (50)..(50): Xaa in position 50 is Ala, Asp, Glu, Gln, Ser or Thr
  Variant (54)..(54): Xaa in position 54 is any amino acid
  Variant (55)..(55): Xaa in position 55 is Asp, Gly or Pro
  Variant (56)..(56): Xaa in position 56 is Asp or Gly
TXXXHIITAVXGSGVLSLXWXXXQXGWXXGXXXXXXFXXXXXXXXXXLXXCYRXXX

SEQ ID NO: 665 - protein, 31 aa, Artificial sequence
  protein pattern
  Variant (2)..(2): Xaa in position 2 is any amino acid
  Variant (3)..(3): Xaa in position 3 is Ala, Asn, Ser, Thr or Val
  Variant (4)..(4): Xaa in position 4 is Phe, Leu or Met
  Variant (5)..(5): Xaa in position 5 is any amino acid
  Variant (6)..(6): Xaa in position 6 is Ala or Ser
  Variant (7)..(7): Xaa in position 7 is Phe, Ile, Leu or Val
  Variant (9)..(9): Xaa in position 9 is Ala, Asp or Asn
  Variant (10)..(10): Xaa in position 10 is Ile, Met or Val
  Variant (15)..(15): Xaa in position 15 is Ala, Ser or Thr
  Variant (16)..(16): Xaa in position 16 is Phe or Tyr
  Variant (17)..(17): Xaa in position 17 is Ala or Ser
  Variant (18)..(18): Xaa in position 18 is any amino acid
  Variant (19)..(19): Xaa in position 19 is Ile or Val
  Variant (27)..(29): Xaa in position 27 to 29 is any amino acid
  Variant (30)..(30): Xaa in position 30 is any or no amino acid
WXXXXXXGXXAFAYXXXXXLIEIQDTXXXXP

SEQ ID NO: 666 - protein, 23 aa, Artificial sequence
  protein pattern
  Variant (2)..(2): Xaa in position 2 is Phe, Ile, Leu or Val
  Variant (3)..(3): Xaa in position 3 is Ile or Leu
  Variant (5)..(5): Xaa in position 5 is Ala or Ser
  Variant (6)..(6): Xaa in position 6 is any amino acid
  Variant (7)..(7): Xaa in position 7 is Ala, Gly or Ser
  Variant (15)..(15): Xaa in position 15 is any amino acid
  Variant (17)..(17): Xaa in position 17 is Ile or Val
  Variant (18)..(18): Xaa in position 18 is Ala, Asp, Glu, Gln, Ser or Thr
  Variant (20)..(20): Xaa in position 20 is His or Tyr
  Variant (21)..(21): Xaa in position 21 is Ile, Met or Val
  Variant (22)..(22): Xaa in position 22 is any amino acid
GXXGXXXFWPLTVYXPXXMXXXQ

SEQ ID NO: 667 - protein, 41 aa, Artificial sequence
  protein pattern
  Variant (2)..(3): Xaa in position 2 to 3 is any amino acid
  Variant (4)..(4): Xaa in position 4 is Ala, Thr or Val
  Variant (6)..(7): Xaa in position 6 to 7 is any amino acid
  Variant (9)..(9): Xaa in position 9 is Ala, Asn, Ser or Thr
  Variant (10)..(10): Xaa in position 10 is any amino acid
  Variant (11)..(11): Xaa in position 11 is Ala, Ile, Leu or Val
  Variant (12)..(12): Xaa in position 12 is Ala, Gly or Ser
  Variant (13)..(13): Xaa in position 13 is Ile, Met or Val
  Variant (14)..(16): Xaa in position 14 to 16 is any amino acid
  Variant (17)..(17): Xaa in position 17 is Ser or Thr
  Variant (18)..(18): Xaa in position 18 is any amino acid
  Variant (21)..(21): Xaa in position 21 is any amino acid
  Variant (25)..(26): Xaa in position 25 to 26 is any amino acid
  Variant (33)..(33): Xaa in position 33 is Asp, Glu or Asn
  Variant (34)..(34): Xaa in position 34 is any amino acid
  Variant (35)..(35): Xaa in position 35 is Ala, Ser or Val
  Variant (37)..(38): Xaa in position 37 to 38 is any amino acid
  Variant (39)..(39): Xaa in position 39 is any or no amino acid
  Variant (41)..(41): Xaa in position 41 is Ala or Thr
EXXXMXXAXXXXXXXXXXFYXLCGXXGYAAFGXXXPXXXLX

SEQ ID NO: 668 - protein, 25 aa, Artificial sequence
  protein pattern
  Variant (2)..(3): Xaa in position 2 to 3 is any amino acid
  Variant (6)..(6): Xaa in position 6 is any amino acid
  Variant (8)..(8): Xaa in position 8 is Ile, Leu or Met
  Variant (9)..(9): Xaa in position 9 is any amino acid
  Variant (11)..(12): Xaa in position 11 to 12 is any amino acid
  Variant (13)..(13): Xaa in position 13 is Ile or Val
  Variant (16)..(16): Xaa in position 16 is Ala, Asn or Thr
  Variant (18)..(18): Xaa in position 18 is Ala, Gly or Thr
  Variant (19)..(19): Xaa in position 19 is Ala, Gly, Ser or Thr
  Variant (20)..(20): Xaa in position 20 is Ala, Ser or Thr
  Variant (21)..(21): Xaa in position 21 is any amino acid
  Variant (23)..(24): Xaa in position 23 to 24 is any amino acid
  Variant (25)..(25): Xaa in position 25 is Ala, Glu or Thr
GXXQYXNXXGXXXGYXIXXXXSXXX

SEQ ID NO: 669 - protein, 26 aa, Artificial sequence
  protein pattern
  Variant (2)..(2): Xaa in position 2 is Ile or Leu
  Variant (3)..(3): Xaa in position 3 is any amino acid
  Variant (4)..(4): Xaa in position 4 is Asp, Glu, Gly or Asn
  Variant (6)..(6): Xaa in position 6 is Asp or His
  Variant (7)..(9): Xaa in position 7 to 9 is any amino acid
  Variant (10)..(10): Xaa in position 10 is Phe or Trp
  Variant (13)..(13): Xaa in position 13 is any amino acid
  Variant (14)..(14): Xaa in position 14 is Ile, Leu, Met or Val
  Variant (16)..(16): Xaa in position 16 is Ala or Val
  Variant (17)..(17): Xaa in position 17 is Ala, Ile or Val
  Variant (18)..(18): Xaa in position 18 is any amino acid
  Variant (20)..(20): Xaa in position 20 is Phe or Leu
  Variant (21)..(21): Xaa in position 21 is any amino acid
  Variant (23)..(23): Xaa in position 23 is Ala or Ser
  Variant (24)..(24): Xaa in position 24 is any amino acid
  Variant (25)..(25): Xaa in position 25 is Ala, Ile or Val
  Variant (26)..(26): Xaa in position 26 is Ala or Gly
QXXXFXXXXXLSXXAXXXSXXYXXXX

SEQ ID NO: 670 - protein, 16 aa, Artificial sequence
  protein pattern
  Variant (7)..(7): Xaa in position 7 is Phe or Tyr
  Variant (8)..(8): Xaa in position 8 is any amino acid
  Variant (9)..(9): Xaa in position 9 is Asp, Glu or Gln
  Variant (10)..(10): Xaa in position 10 is Ala or Val
  Variant (11)..(11): Xaa in position 11 is Ile or Val
  Variant (12)..(12): Xaa in position 12 is any amino acid
  Variant (13)..(13): Xaa in position 13 is Ala, Asn, Ser or Thr
  Variant (14)..(14): Xaa in position 14 is any amino acid
  Variant (15)..(15): Xaa in position 15 is Phe or Leu
  Variant (16)..(16): Xaa in position 16 is Gly, Pro or Ser
GKRNYTXXXXXXXXXX

SEQ ID NO: 671 - protein, 13 aa, Artificial sequence
  protein pattern
  Variant (2)..(2): Xaa in position 2 is Asp, Glu or Gly
  Variant (5)..(6): Xaa in position 5 to 6 is any or no amino acid
  Variant (8)..(9): Xaa in position 8 to 9 is any or no amino acid
  Variant (11)..(11): Xaa in position 11 is any amino acid
  Variant (13)..(13): Xaa in position 13 is Asn, Ser or Thr
DXDGXXRXXRXGX

SEQ ID NO: 672 - protein, 16 aa, Artificial sequence
  protein pattern
  Variant (2)..(3): Xaa in position 2 to 3 is any amino acid
  Variant (4)..(4): Xaa in position 4 is any or no amino acid
  Variant (6)..(8): Xaa in position 6 to 8 is any amino acid
  Variant (9)..(9): Xaa in position 9 is any or no amino acid
  Variant (11)..(11): Xaa in position 11 is any amino acid
  Variant (12)..(12): Xaa in position 12 is Phe, Ile, Leu or Met
  Variant (16)..(16): Xaa in position 16 is Gly or Asn
VXXXTXXXXMXXPFFX

SEQ ID NO: 673 - DNA, 1812 bp, Arabidopsis thaliana
  CDS (1)..(1812)
atgttggaaaccgaaagcagtgtctgcgacaacatcgccggcaatgagaaatggcgagcggaagctgaaattggtggcaacgagagagctctgcaagcgcttcgagaactcattatcttcccttttcgttaccctctcgaagctcgaactcttggtctcaaatggcctagaggattgcttctctacggtcctcctggaaccggcaagacaagcttggtccgtgctgttgtccaggaatgtgatgcacatttgattgttttaagccctcattctgtacatcgagcacatgctggagaaagcgagaaagtcttaagggaagctttcgctgaggcttcttctcacgctgtttcagacaagccttctgtgatttttattgatgaaatcgatgttctttgtcctcgtcgtgatgctagacgagaacaagatgttcgtattgcttctcaactgtttacacttatggactcaaacaagccttcatcatctgcaccaagagttgttgttgtagcatccacaaatagggtggatgcgattgacccagcgctaagaagagcgggacgatttgatgctttagttgaagtgagcacaccaaatgaggaggatcgtttaaaaatcctgcagctgtacacaaagaaagtcaatttagatcctagtgtcgatcttcaagccattgcaatatcttgcaacggttatgttggagcagatttggaagctttatgtcgtgaagcgacaatatctgcaagtaaaagatcttcagattctcttattctaacatctcaagacttcaagattgcaaaatctgtggttggtccaagtataaacagaggcatcacagttgaaatccctaaagtgacatgggacgatgttggtggtcttaaagacttaaagaaaaagctccagcaagctgttgaatggccaatcaaacattcagctgcatttgtaaaaatgggcatatcgccaatgcgtgggatacttctacatggtcctccaggttgctcaaagacaactcttgctaaagccgctgcaaatgctgctcaagcctccttcttttccttaagctgtgcggagctattttctatgtatgttggagaaggtgaagcattattgcggaatacatttcaaagagctcgacttgcttctccaagtataatattctttgatgaagctgatgtcgttgcctgtaaaagaggtgatgagagctcaagcaatagttctacagttggagaaaggcttctatctacactgttaaccgaaatggacggtcttgaagaagcaaagggaatcctcgtcttggctgccacaaaccgcccgtatgcaattgatgctgctctaatgcgacctggtcgatttgatctcgtgctatacgtgccaccgcctgatctagaagcccggtttgaaatactgcaagtgcatacacgcaacatgacactaggagacgacgttgatctcagaaaaatcgctgaagaaaccgatctcttcacaggtgccgagctcgagggtctatgcagagaaagcggaactgtctcacttagagaaaacatcgcagcaaccgctgtcttcaatcgccatttccaaaccgcaaaaagctcgcttaaaccagcgttaacaatcgaagaagtcgaaacttattcatcattcaggaaggcggcgaaaagatctgattcgaaaccgattccgattaacaaaaagaaggcgacttccaccgtcttcggattctcatggcaattaggtgttttgagcttattgttgcttgctactggaaactattacttcaaccacactaaacatgaattactagtagcttctgctacatga

SEQ ID NO: 674 - protein, 603 aa, Arabidopsis thaliana
MLETESSVCDNIAGNEKWRAEAEIGGNERALQALRELIIFPFRYPLEARTLGLKWPRGLLLYGPPGTGKTSLVRAVVQECDAHLIVLSPHSVHRAHAGESEKVLREAFAEASSHAVSDKPSVIFIDEIDVLCPRRDARREQDVRIASQLFTLMDSNKPSSSAPRVVVVASTNRVDAIDPALRRAGRFDALVEVSTPNEEDRLKILQLYTKKVNLDPSVDLQAIAISCNGYVGADLEALCREATISASKRSSDSLILTSQDFKIAKSVVGPSINRGITVEIPKVTWDDVGGLKDLKKKLQQAVEWPIKHSAAFVKMGISPMRGILLHGPPGCSKTTLAKAAANAAQASFFSLSCAELFSMYVGEGEALLRNTFQRARLASPSIIFFDEADVVACKRGDESSSNSSTVGERLLSTLLTEMDGLEEAKGILVLAATNRPYAIDAALMRPGRFDLVLYVPPPDLEARFEILQVHTRNMTLGDDVDLRKIAEETDLFTGAELEGLCRESGTVSLRENIAATAVFNRHFQTAKSSLKPALTIEEVETYSSFRKAAKRSDSKPIPINKKKATSTVFGFSWQLGVLSLLLLATGNYYFNHTKHELLVASAT

SEQ ID NO: 675 - DNA, 2430 bp, Brassica napus
  CDS (1)..(2430)
atgtcgaacccagctgaatcttcagactcgaaatcgaagaaagatttcagtactgctattctggagaggaagaagtctcctaacagactcgtcgtcgatgaggccatcaacgatgataactccgtcgtctctctccaccctgccaccatggagaagctccagctcttccgtggcgataccattctcatcaagggtaagaaaaggaaggacactatctgcattgctcttgctgatgaatcatgtgaggagccaaagatcaggatgaacaaagtggtcaggtctaacttgagggttagacttggagatgttatctctgttcaccagtgccctgatgtcaagtacggaaagcgtgtgcacatcttgcctgttgatgataccgttgaaggagtcactggaaacctctttgatgcttacctcaaaccttatttcttggaggcataccgcccggtgaggaagggagatctcttcctagtgagaggaggaatgaggagtgtggagttcaaggttattgagacggatcctgctgagtactgtgtggttgctccggacactgagattttctgtgagggtgagccagtcaagagagaggatgaagaaaggctagatgaagtgggttatgatgatgttggtggtgtcaggaagcagatggctcagatcagggagcttgttgagcttcccttgaggcatccacagctcttcaagtcgattggtgttaagccaccgaagggaattctgctttacggaccacctgggtccggaaagactttgattgctcgcgccgtggctaacgaaaccggtgcgtttttcttctgtatcaatgggcctgagatcatgtccaagctggctggtgagagtgagagcaacctcaggaaagcgtttgaggaggctgagaagaacgctccttcgatcatattcattgatgagattgactctattgcaccgaaaagagagaagacgaatggagaggttgagaggaggattgtgtctcagctcctcacgctgatggatggtctgaagtcacgtgctcatgtcattgtcatgggagcaaccaatcgccccaacagtattgatccggctttgagaaggtttggaagatttgatagggagattgatatcggtgttcctgatgagattggacgtcttgaagttctcaggatccacaccaagaacatgaagctcgctgaagatgttgatcttgaaaggatctcaaaggacacacacggttatgttggtgctgatcttgcagctctctgcactgaagctgccctgcaatgcatcagggagaagatggatgtgattgatttggaagatgactccatagatgctgaaatcctcaactccatggcagtgaccaatgaacacttccacactgctcttggaaacagcaacccatctgcacttcgtgaaactgttgtggaggttcctaatgtttcttgggatgacattggaggtcttgagaatgtcaagagagagctccaggagactgttcaatacccagtcgagcacccagagaagttcgagaaattcggtatgtctccatcaaagggagtcctattctacggtcctcctggatgtggtaaaacccttttggccaaagctatagccaacgagtgccaagcaaacttcatcagcgtcaaaggtcctgagcttctcaccatgtggtttggagagagtgaagccaacgtccgtgaaatctttgacaaggcacgtcagtctgctccatgtgttctcttctttgacgagctcgactccattgcgactcagagaggaggtggaagcggaggtgatgctggcggcgcagcggatagagtcctgaaccagcttttgactgagatggatggaatgaacgccaagaagactgtcttcatcatcggagcaaccaacagacccgacattattgattctgctcttctccgtccaggaaggctcgaccagctcatttacattccactaccagacgaggactcacgtctcaatatcttcaaggcctgcttgaggaaatcacctgttgctaaagatgtggacatcaacgctctcgctaagtacacgcaggggttcagtggtgctgatatcactgagatttgccagagggcttgcaaatacgccatcagagaaaacattgagaaggacattgaaaaggagaagaggaggagcgagaacccagaggcgatggaggaagatggagtggatgaagtgtcagagatcaaagctgcacattttgaggagtcgatgaagtatgcgcgcaggagtgtgagtgatgcagacatcaggaagtaccaagcctttgctcagacgctgcagcagtctagagggtttggttctgagttcaggttcgagactaatgctggttcaggtgcaaccactggagtcgctgatccttttgccacctctgcagctgctgctgcggacgatgatgatctctacaattag

SEQ ID NO: 676 - protein, 809 aa, Brassica napus
MSNPAESSDSKSKKDFSTAILERKKSPNRLVVDEAINDDNSVVSLHPATMEKLQLFRGDTILIKGKKRKDTICIALADESCEEPKIRMNKVVRSNLRVRLGDVISVHQCPDVKYGKRVHILPVDDTVEGVTGNLFDAYLKPYFLEAYRPVRKGDLFLVRGGMRSVEFKVIETDPAEYCVVAPDTEIFCEGEPVKREDEERLDEVGYDDVGGVRKQMAQIRELVELPLRHPQLFKSIGVKPPKGILLYGPPGSGKTLIARAVANETGAFFFCINGPEIMSKLAGESESNLRKAFEEAEKNAPSIIFIDEIDSIAPKREKTNGEVERRIVSQLLTLMDGLKSRAHVIVMGATNRPNSIDPALRRFGRFDREIDIGVPDEIGRLEVLRIHTKNMKLAEDVDLERISKDTHGYVGADLAALCTEAALQCIREKMDVIDLEDDSIDAEILNSMAVTNEHFHTALGNSNPSALRETVVEVPNVSWDDIGGLENVKRELQETVQYPVEHPEKFEKFGMSPSKGVLFYGPPGCGKTLLAKAIANECQANFISVKGPELLTMWFGESEANVREIFDKARQSAPCVLFFDELDSIATQRGGGSGGDAGGAADRVLNQLLTEMDGMNAKKTVFIIGATNRPDIIDSALLRPGRLDQLIYIPLPDEDSRLNIFKACLRKSPVAKDVDINALAKYTQGFSGADITEICQRACKYAIRENIEKDIEKEKRRSENPEAMEEDGVDEVSEIKAAHFEESMKYARRSVSDADIRKYQAFAQTLQQSRGFGSEFRFETNAGSGATTGVADPFATSAAAAADDDDLYN

SEQ ID NO: 677 - DNA, 2034 bp, Oryza sativa
  CDS (169)..(1905)
gatggttaccgtctccctcccaaagccccgcctggtgattcgccgtctccctccgtcgccgtgccttcccccgccaccgtcctgctcaccggcgttccgccggaacgacttgaagtccacctctcgagctcggcggcctcccccttagggcagaagcggacgaggcgaatggaagaggttaggggcagggagagcaaagaccaccgcggcggcggcggcggcggcggaggtgatggggacggcgagcggacgggacggtggcgcgccgaggaggtcatcgctgggaaccgcgcggttctggaggctctccgggagctcgtgatgtatcctgtcctctacgcacgggaggcccgcgtgctcggcctcaattttcccagaggattgctgctccacggcccctctggcactggaaagaaaagcatggtccgagctgttgttcgagaatgtaatgcccacctcacagtgattgattcaatttctgtgcataaaccccacgctggagagggggagaagttcatgcgagaggcttttactgaagcatattcccaggcatcacagggtagaccagccgtgatattcattgatgaacttgatgacatatgtccaccgcgtggcagtaggagagagcaagggtcccgcattgttggtcagctgttgactctgatggacgggaagtcatcaaagctgcttccccacctagttgttgttgcatctgctaccagggtggatgctattgagtcagcactgcgaaggcctgggcgttttgactcagagatagaggttactgttcctacagcagaagaaaggttcgagattcttaagctttataccaagaatctacatcttggtgaatgtgttgatcttcaatctgttgctgcatcctgcaatggttatgttggagctgatttacaagctttatgtcgagaagctgcaagacgtgcttatggtagattatcaagctcatcagagagtgagaatgtgctaacgctaatcatggaggattgggagtctgctaaatctgtggccaaaaatagtgtgacaagaggggtaactaaagaaattccagctgtttcatgggatgatataggaggtttgaaagctgttaagaaaaaacttcagcaagctgttgaatggcccatcaagcatgctgcttcatttgatagacttggaatatcacctatccgtggggtgctattgcatggtccaccagggtgctcaaagactacccttgcaaaggctgctgctcatgctgcccaagcttctttcttttcattaagtggtgctgagttatactccaagtatgttggtgaaggtgaagctttgttgcgacgtacattccagatggcacgtcttgcttctccaagcattatattttttgatgaggctgatgcaattgcccctaaaagaactggtcccagcgggaactctagtggcaatgccacggttggagaaagactcttatcaactctattgacggaaatggatggtttagaactggctacgggaattattgtattggctgctactaatcgcccaaatgcaattgatgctgctcttctgcgcccagggcgtttcgatatggttttgtatgttccaccaccagatgcggaaggtcgatatgaaatactacgcatccatacacgcaaaatgccattaggagatgatgtggatctttggaaggtagcagagcgtaccgagcttttcacgggcgcagatcttgaaggcctgtccagggaggcgggaatggctgccttgagggaaagtctgaggtcagagcgttttgtatgtgacgatattcacttccaggccgcgctaagatccttgcgtccatcacttacacaatcagtggttgatgagtactcaaatgcagccatccatggtccattgacgaggagaaaacactaaaagatgtattattctggcgcacaagcatcagtgtcgcccattgttgattctgactagttatcagaacattgtatcatcggtctgctgtatatattgaccaaagttgtgacatgttcccatatgattgcc

SEQ ID NO: 678 - protein, 578 aa, Oryza sativa
MEEVRGRESKDHRGGGGGGGGDGDGERTGRWRAEEVIAGNRAVLEALRELVMYPVLYAREARVLGLNFPRGLLLHGPSGTGKKSMVRAVVRECNAHLTVIDSISVHKPHAGEGEKFMREAFTEAYSQASQGRPAVIFIDELDDICPPRGSRREQGSRIVGQLLTLMDGKSSKLLPHLVVVASATRVDAIESALRRPGRFDSEIEVTVPTAEERFEILKLYTKNLHLGECVDLQSVAASCNGYVGADLQALCREAARRAYGRLSSSSESENVLTLIMEDWESAKSVAKNSVTRGVTKEIPAVSWDDIGGLKAVKKKLQQAVEWPIKHAASFDRLGISPIRGVLLHGPPGCSKTTLAKAAAHAAQASFFSLSGAELYSKYVGEGEALLRRTFQMARLASPSIIFFDEADAIAPKRTGPSGNSSGNATVGERLLSTLLTEMDGLELATGIIVLAATNRPNAIDAALLRPGRFDMVLYVPPPDAEGRYEILRIHTRKMPLGDDVDLWKVAERTELFTGADLEGLSREAGMAALRESLRSERFVCDDIHFQAALRSLRPSLTQSVVDEYSNAAIHGPLTRRKH

SEQ ID NO: 679 - DNA, 2882 bp, Glycine max
  CDS (194)..(2665)
acacccaccaccctctccatcacacctgcccgcctccatcacaggcgctcgttccacatcaccggcgcctttcctgccgtctcgcacgcctgtcgcctcgccggccgacagcattccaaactcgcccgtcggacttcggtgactgacatagcaacaacgagcgagacaccgctcatcacacaacaccgcaatcatgtctgcagagccagaccactccgccagcaagggtaaggtcaagctcgataatgacccatcgggcgccgagaagcgcgatgagaatgaggtcgccacagcaatcctcaagaagaagaagaagcccaacagcttgatcgtcacagacgccaccactgatgacaactcgattctcgccctctccaacaacaccatggagacgctacagctgttccgtggtgacacagtgctcgtcaagggcaagaagcgaaaggacaccgtcctcatcgtgctggccgatgacgacctcgatgacgggtcagtgcgcatgaaccgcgtcgtgagacacaacctccgcgtcaagctcggcgacgttgtcacagtcaatccatgccccgatatcaagtacgccaagcgcatcgctgtcttgcccatggccgacaccatcgagggcctcacaggctctctcttcgatgtgttcctcgcaccatacttccgtgaggcctaccgaccgcttcgacaaggcgatctcttcacagctcgcgcggctatgcgcacagtggagttcaaggtcgtcgagattgacccacccgagtacggtatcgtggcacaagacacagtcatccattgtgaaggcgagccgatccagcgagaagacgaggagggtaatctcaatgaggttggatacgacgatattggtggctgccgcaagcagatggcgcaggtgcgagagctggttgagctgccccttaggcatccacaactgttcaagtccatcggtatcaagcctccgcgtggtatcctgatgtacggacctccgggtactggtaagactctgatggcgcgagccgtcgctaacgagactggtgcattcttctttctgatcaacgggcctgagatcatgtcgaagatggctggtgagtccgagtcgaatctgcggaaggctttcgaggaggccgagaagaacagcccggccatcattttcatcgacgaaatcgactcgatcgcacccaagcgtgagaagaccaacggcgaagtcgagcgtcgtgtcgtttctcagctgctcaccctcatggacggcatgaaggctcgctcaaatgtggtcgtcatggccgccactaaccgccctaactcgatcgatcctgcccttcgccgcttcggccgcttcgatcgcgaggtcgacatcggcattcctgacccaactggtcgtctcgagattctgcaaatccacaccaagaacatgaagctcgccgacgaggtcgacctcgaaacgatcgccgccgagacgcacggttacgtgggttctgatatcgcctcgctctgctcagaagcagccatgcagcagattcgtgagaagatggacttgatcgatcttgatgaggacacaattgatgctgaggttcttgacagccttggtgtcacacaagagaacttccgcttcgccctgggcgtcagcaacccaagcgctcttcgcgaggtcgctgttgtcgaggtgccaaacgtgcggtgggaggacattggtggcctggaggacgtcaagcgcgagctcgtcgagagcgtgcaatacccagtcgaccacccagagaagttcctcaagttcggtctcagcccgtctcgcggtgtgctattctatggtccaccaggtactggtaaaacgcttcttgctaaggcggttgccaacgagtgcgccgccaacttcatctctgtcaagggtccagagctgctctccatgtggttcggagagtctgagtccaacattcgagacatcttcgacaaggctcgcgctgccgcaccatgcgtggtcttcctcgatgagctggattccattgccaaatctcgaggcggctctcagggcgatgctggcggtgccagcgatcgtgtcgtcaaccagcttctcactgagatggacggtatgaccagcaagaagaacgtgttcgttattggtgccaccaaccgacccgagcaactcgacaacgctctgtgccgtcctggtcgtctcgatactcttgtgtacgtgccacttcctgaccagccgggtcgtgagagcattctcaaggctcagctacgcaagaccccagtcgccaaggatgtcgatctctcgtacattgcctccaagacacatggcttctccggtgccgatctcggcttcatcacccagcgtgctgtcaagctggccatcaaggagagcatctcgctggccattgagaagcagaaggagcgtgaggccgcagagggcgatgacaccaagatggacgaggatgtcgatgaggaggacccagtgccagagctcacgaagcgtcacttcgaggaggccatgagcatggctcgtcgctcagtcacagacactgagattaggcggtacgaggccttcgcgcagagcatgaagaacagcgctggcggcagtgctttcttccgcttccctgaaggtggtgccgagggtgctgcggccgaggctcagcagaatggtgctggcgaagaggatctctacgattaagtacgacaagttgtggtatacaggcatggggacggaaactggttggccgcggcggattctagttttgcgtcgatgtatgcttatgatacagatgatgcggatggctcggtcagtcgttgcatgaatgaggcgatgcgcctcaccaggagctggccgttatgatagagtgtctcaatagttcgcgccctccgctggcgaaatgaagcatttgcacgat

SEQ ID NO: 680 - protein, 823 aa, Glycine max
MSAEPDHSASKGKVKLDNDPSGAEKRDENEVATAILKKKKKPNSLIVTDATTDDNSILALSNNTMETLQLFRGDTVLVKGKKRKDTVLIVLADDDLDDGSVRMNRVVRHNLRVKLGDVVTVNPCPDIKYAKRIAVLPMADTIEGLTGSLFDVFLAPYFREAYRPLRQGDLFTARAAMRTVEFKVVEIDPPEYGIVAQDTVIHCEGEPIQREDEEGNLNEVGYDDIGGCRKQMAQVRELVELPLRHPQLFKSIGIKPPRGILMYGPPGTGKTLMARAVANETGAFFFLINGPEIMSKMAGESESNLRKAFEEAEKNSPAIIFIDEIDSIAPKREKTNGEVERRVVSQLLTLMDGMKARSNVVVMAATNRPNSIDPALRRFGRFDREVDIGIPDPTGRLEILQIHTKNMKLADEVDLETIAAETHGYVGSDIASLCSEAAMQQIREKMDLIDLDEDTIDAEVLDSLGVTQENFRFALGVSNPSALREVAVVEVPNVRWEDIGGLEDVKRELVESVQYPVDHPEKFLKFGLSPSRGVLFYGPPGTGKTLLAKAVANECAANFISVKGPELLSMWFGESESNIRDIFDKARAAAPCVVFLDELDSIAKSRGGSQGDAGGASDRVVNQLLTEMDGMTSKKNVFVIGATNRPEQLDNALCRPGRLDTLVYVPLPDQPGRESILKAQLRKTPVAKDVDLSYIASKTHGFSGADLGFITQRAVKLAIKESISLAIEKQKEREAAEGDDTKMDEDVDEEDPVPELTKRHFEEAMSMARRSVTDTEIRRYEAFAQSMKNSAGGSAFFRFPEGGAEGAAAEAQQNGAGEEDLYD

SEQ ID NO: 681 - DNA, 2652 bp, Glycine max
  CDS (204)..(2492)
gaattcggcacgaggtgaattctgctctttgatcatcatcatcttcttcttcttcaatttaagcaagcatgtctcagcaaggcgaatcatcggacccgaaatcggggaagaaggacttctcaaccgcgattctggaacgcaaaaagtcgccgaaccggcttgtcgtggatgaggctgtcaacgacgacaactccgtggtcaccatgcatccccaaaccatggaaaagcttcagcttttccgaggggacactatcctcatcaagggtaagaaacggaaggataccatttgcatagctcttgctgatgagaactgtgaggagccgaagatcaggatgaataaagttgtgaggtcaaatttgcgggttcggcttggagatgttgtgtctgtgcaccagtgcccggatgttaaatatgggaaacgtgtgcacattctgcctattgatgataccattgaaggtgtcactggcaatctgtttgatgctttcttgaaaccctatttcttggaagcttaccgtcctgtcagaaaaggagatctatttcttgtccggggagggatgagaagtgtagagttcaaggtggttgaaaccgatcctggagaatattgtgttgttgctccagacactgaaattttctgtgagggggagcctttgaaaagagaagatgaagagagactggatgaagtcgggtatgatgatgtgggtggtgtcaggaaacaaatggctcagattcgtgagttggttgagcttccattgaggcatccacagctttttaaatcaattggtgtgaaaccacccaaaggaattttactttatggacccccaggttctgggaagacattaatagcaagagctgtagctaatgaaactggagcttttttcttttgtattaacggaccagagattatgtccaaacttgctggagagagtgaaagcaatctcaggaaagcgtttgaagaagcagaaaagaatgcaccatccattatcttcattgatgaaattgattccattgcccccaagcgggagaagacacatggtgaagttgaaaggaggattgtttcacaacttttgactcttatggatggattaaaatctcgtgctcatgttattgttattggagctactaatcgtccaaatagcattgacccagcattgagaaggtttggtagatttgatagggaaattgatattggtgttcccgatgaagttgggagacttgaagtccttcgcatacatactaaaaacatgaagctatctgatgatgttgatttagagagaattgcaaaagatactcatgggtatgttggtgctgaccttgctgccctttgcactgaagctgctttgcaatgcattagggagaagatggatgtaattgacttggaggatgagactattgatgcagaagtactgaattccatggcagttacaaatgagcatttccagactgcccttggaacaagcaacccatcagctttacgtgaaactgttgttgaagtgcctaatgtcagctgggaagacattggaggccttgaaaatgtcaagcgtgaactgcaagagactgtacaatatccagttgagcacccagaaaagtttgagaagtttggtatgtctccatctaaaggagtacttttctatggtcctccaggatgtgggaaaactttgttagccaaagcaattgctaatgaatgtcaagctaacttcatcagtgtgaaaggtccagaattgcttacaatgtggtttggtgaaagtgaagctaatgttagagaaatttttgacaaggccagacaatcggctccatgtgtcctcttctttgatgagcttgactctattgccactcagagaggaagcagtgttggggatgctggtggtgcggctgatagagttctaaatcaacttttgactgaaatggatggcatgtctgccaaaaagactgtgttcataattggggcaactaacagacctgacatcattgacccagcacttcttcgaccaggccgtctggatcaattgatctatattcctctccctgatgaggattcccggcatcaaatctttaaagcctgcttgaggaagtcacctatcgcaaaaaatgttgatttgagagcattggctaggcacactcaagggttcagtggtgctgatattacagaaatatgccagcgagcatgcaaatatgccataagagaaaacatagagaaggacattgagcgagagaggaagagtagggaaaaccctgaggccatggatgaagataccgtcgacgacgaagttgcggagatcaaggctgctcattttgaggagtcaatgaagtttgcacggaggagtgttagtgatgctgatattcgcaagtatcaggcatttgctcagaccttacagcaatcaagagggtttggaagtgaatttaggtttccagagtctggagataggactactactggatctgacccctttgcagcttctgctggtggggctgacgaagatgatctatatagttaggctttattatcacagtgatgtatgaaatcacatgtctacctcacctctcaggagggataactttgaagcctgtcttatattttgcttttcttgtactcaattatcctgaattgttaccgggttaaccttaaataccatatatggatcgtatcttcatttt

SEQ ID NO: 682 - protein, 762 aa, Glycine max
MHPQTMEKLQLFRGDTILIKGKKRKDTICIALADENCEEPKIRMNKVVRSNLRVRLGDVVSVHQCPDVKYGKRVHILPIDDTIEGVTGNLFDAFLKPYFLEAYRPVRKGDLFLVRGGMRSVEFKVVETDPGEYCVVAPDTEIFCEGEPLKREDEERLDEVGYDDVGGVRKQMAQIRELVELPLRHPQLFKSIGVKPPKGILLYGPPGSGKTLIARAVANETGAFFFCINGPEIMSKLAGESESNLRKAFEEAEKNAPSIIFIDEIDSIAPKREKTHGEVERRIVSQLLTLMDGLKSRAHVIVIGATNRPNSIDPALRRFGRFDREIDIGVPDEVGRLEVLRIHTKNMKLSDDVDLERIAKDTHGYVGADLAALCTEAALQCIREKMDVIDLEDETIDAEVLNSMAVTNEHFQTALGTSNPSALRETVVEVPNVSWEDIGGLENVKRELQETVQYPVEHPEKFEKFGMSPSKGVLFYGPPGCGKTLLAKAIANECQANFISVKGPELLTMWFGESEANVREIFDKARQSAPCVLFFDELDSIATQRGSSVGDAGGAADRVLNQLLTEMDGMSAKKTVFIIGATNRPDIIDPALLRPGRLDQLIYIPLPDEDSRHQIFKACLRKSPIAKNVDLRALARHTQGFSGADITEICQRACKYAIRENIEKDIERERKSRENPEAMDEDTVDDEVAEIKAAHFEESMKFARRSVSDADIRKYQAFAQTLQQSRGFGSEFRFPESGDRTTTGSDPFAASAGGADEDDLYS

SEQ ID NO: 683 - DNA, 2652 bp, Glycine max; identical to SEQ ID NO: 681
  CDS (219)..(2492)

SEQ ID NO: 684 - protein, 757 aa, Glycine max
MEKLQLFRGDTILIKGKKRKDTICIALADENCEEPKIRMNKVVRSNLRVRLGDVVSVHQCPDVKYGKRVHILPIDDTIEGVTGNLFDAFLKPYFLEAYRPVRKGDLFLVRGGMRSVEFKVVETDPGEYCVVAPDTEIFCEGEPLKREDEERLDEVGYDDVGGVRKQMAQIRELVELPLRHPQLFKSIGVKPPKGILLYGPPGSGKTLIARAVANETGAFFFCINGPEIMSKLAGESESNLRKAFEEAEKNAPSIIFIDEIDSIAPKREKTHGEVERRIVSQLLTLMDGLKSRAHVIVIGATNRPNSIDPALRRFGRFDREIDIGVPDEVGRLEVLRIHTKNMKLSDDVDLERIAKDTHGYVGADLAALCTEAALQCIREKMDVIDLEDETIDAEVLNSMAVTNEHFQTALGTSNPSALRETVVEVPNVSWEDIGGLENVKRELQETVQYPVEHPEKFEKFGMSPSKGVLFYGPPGCGKTLLAKAIANECQANFISVKGPELLTMWFGESEANVREIFDKARQSAPCVLFFDELDSIATQRGSSVGDAGGAADRVLNQLLTEMDGMSAKKTVFIIGATNRPDIIDPALLRPGRLDQLIYIPLPDEDSRHQIFKACLRKSPIAKNVDLRALARHTQGFSGADITEICQRACKYAIRENIEKDIERERKSRENPEAMDEDTVDDEVAEIKAAHFEESMKFARRSVSDADIRKYQAFAQTLQQSRGFGSEFRFPESGDRTTTGSDPFAASAGGADEDDLYS

SEQ ID NO: 685 - DNA, 2376 bp, Aspergillus fumigatus
  CDS (1)..(2376)
atgagcgcagaaccagaccacgctcatgataagaagagggtgcacctccatgtgaccgatgccgtcaacgatgacaactcagtcattgccctttccaacaataccatggagacgcttcagctattccgtggtgacacagtgttggtgaagggcaagaaacggaaggataccgttttgattgtgcttgctgatgatgacctggatgatggaagcgcccgcatcaaccgtgttgtgaggcacaatctgcgtgtcaagcacggtgacatcatcaccgttcacccttgcccagatatcaaatatgccaagcggattgccgtccttcccattgcagacaccgtagagggtctgactggatcccttttcgacgtctacctcgccccatacttccgtgaagcctacagacccgtgaaacagggtgatttgttcacagtacgtggaggtatgagacaggtggagtttaaggttgttgaggtcgatcccccagagtatggtattgtcgcacaagataccatcatccactgcgagggcgagcccatccagcgggaggatgaggagggcaacctgaacgaggtcggttatgacgatatcggtggttgcagaaagcagatggcacagatccgtgaattggtcgagttgcctctgcgtcatcctcagctgttcaagtccatcggtatcaagccaccccgtggtattctgatgtacggtccccctggtaccggtaagacactgatggctcgtgccgtggcgaacgagactggtgccttcttcttcctgatcaatggtcccgaaatcatgtccaagatggccggtgaatccgagtcgaatttgcgcaaggcgttcgaggaggctgagaaaaactctcccgccattatcttcattgacgaaatcgactccatcgcgcctaagcgtgagaagaccaacggagaggtcgagcgccgtgtcgtctctcaactcctgactctgatggacggcatgaaggctcgttccaacgtcgtcgtcatggctgctactaaccgccccaactccatcgaccctgcccttcgtcgtttcggccgtttcgaccgtgaagtggatatcggtatcccagaccccactggccgtctcgagatcctgtccattcacaccaagaacatgaaacttgctgaggacgtcgatctggagaccattgcggccgagactcacggctatgtcggttccgatcttgcctctctctgctctgaggccgctatgcagcagattcgtgagaagatggatctgatcgatcttgacgaggacactatcgacgcagaggtgcttgactcccttggtgttacaatggagaacttccgttacgccctcggcgtttccaacccctctgctcttcgcgaggttgctgttgtcgaggttcccaatgtccgttgggaggatattggtggtctggaggaggtcaagcgcgagctcatcgagagcgtccaataccctgtggatcaccccgaaaagttccagaagttcggcctttcgccatcccgtggtgttctgttctatggtcctcctggtactggtaagaccatgcttgccaaggccgtggcgaacgagtgtgctgccaacttcatctcagtcaagggacctgagcttctgagcatgtggttcggtgagtctgagagcaacatccgggacattttcgacaaggcccgtgctgctgcgccttgcgtcgttttccttgacgagttggattcgatcgccaagtcccgtggtggctccgtcggtgacgctggtggtgcatctgaccgtgtggtcaaccagcttcttactgaaatggacggcatgacgtcgaagaagaatgtgttcgtcatcggtgctaccaacagacctgagcagcttgatgctgccctggttcgtcctggtcgtctcgataccctggtctacgtacctctgcccgatcaggcttctcgtgagagcattctcagggctcagctccgcaaaacccctgtcgcccccgacgttgatatccccttcattgccagcaagactcatggattctctggtgccgatcttggatttgtcacccagcgcgccgtcaagctggccatcaaggaatccattgccgctgaaattgagcgccagaagcagcgtgaggctgctggagaggatatcaagatggatgatgagggcgaggaggaggacccggtgccccagctcacccgtgctcacttcgaggaggctatgaagtcggctcgccgctccgtcagcgatgtggagattcgccgttacgaggctttcgctcagagcctgaagaactccggtggcagcagcttcttccgcttcccctcttcgggtgagatccaaaataacgacacgttcggtgatgccggcaatgatgacagcctctacgactaa

SEQ ID NO: 686 - protein, 791 aa, Aspergillus fumigatus
MSAEPDHAHDKKRVHLHVTDAVNDDNSVIALSNNTMETLQLFRGDTVLVKGKKRKDTVLIVLADDDLDDGSARINRVVRHNLRVKHGDIITVHPCPDIKYAKRIAVLPIADTVEGLTGSLFDVYLAPYFREAYRPVKQGDLFTVRGGMRQVEFKVVEVDPPEYGIVAQDTIIHCEGEPIQREDEEGNLNEVGYDDIGGCRKQMAQIRELVELPLRHPQLFKSIGIKPPRGILMYGPPGTGKTLMARAVANETGAFFFLINGPEIMSKMAGESESNLRKAFEEAEKNSPAIIFIDEIDSIAPKREKTNGEVERRVVSQLLTLMDGMKARSNVVVMAATNRPNSIDPALRRFGRFDREVDIGIPDPTGRLEILSIHTKNMKLAEDVDLETIAAETHGYVGSDLASLCSEAAMQQIREKMDLIDLDEDTIDAEVLDSLGVTMENFRYALGVSNPSALREVAVVEVPNVRWEDIGGLEEVKRELIESVQYPVDHPEKFQKFGLSPSRGVLFYGPPGTGKTMLAKAVANECAANFISVKGPELLSMWFGESESNIRDIFDKARAAAPCVVFLDELDSIAKSRGGSVGDAGGASDRVVNQLLTEMDGMTSKKNVFVIGATNRPEQLDAALVRPGRLDTLVYVPLPDQASRESILRAQLRKTPVAPDVDIPFIASKTHGFSGADLGFVTQRAVKLAIKESIAAEIERQKQREAAGEDIKMDDEGEEEDPVPQLTRAHFEEAMKSARRSVSDVEIRRYEAFAQSLKNSGGSSFFRFPSSGEIQNNDTFGDAGNDDSLYD

SEQ ID NO: 687 - DNA, 2481 bp, Oryza sativa
  CDS (1)..(2481)
atggcgagccagggggagccctcgtcgtcggccgatccgaaggggaagaaggactactcgacggcgatcctggagaggaagaagtcgccgaaccggctggtggtggacgaggccaccaatgacgacaactccgtcgtcgcgctgcacccggacaccatggagaggctgcagctcttccgcggcgacaccgtcctcctcaagggcaagaagaggaaagatactatttgcattgtccttgcggacgaaacctgtgaggagcccaagattaggatgaacaaggttgtcaggaagaacctgagggtgcgacttggtgatgttgtttctgtccaccagtgccaggatgtgaaatacgggaaacgtgtgcacattcttccgattgatgatacagttgaaggcattaccgggaacctgtttgatgccttcctgaagccatacttcttagaagcataccgcccagtgaggaaaggagatctcttccttgtcaggggtggaatgagaagtgtggaattcaaagtcatagagactgaccctactgagtattgcatcgttgcaccagatacagaaatattctgtgatggggagcctattaagagggaagatgaggaaaggcttgatgaggttggatatgatgatgttggtggagttagaaagcagatggctcaaatcagagagcttgttgagcttccactgcgtcatccccaacttttcaaatccattggtgtgaagccaccaaagggcatattgctgtatggaccacctggttctggaaaaaccctcattgctcgtgctgttgcaaatgagactggagcctttttctttttgattaatggacctgagattatgtcaaagctagctggagagagtgagagcaatctcaggaaggcatttgaagaagcagagaagaatgcaccatctatcattttcattgatgagattgattccattgctcccaagagagagaagaccaatggagaagtggaacgtcgtattgtttcacagctgttgactcttatggatggactcaaagctcgttctcatgttattgttatgggtgctacaaaccgtcccaacagcattgatcctgctcttcggaggtttggaaggtttgaccgtgagattgacattggtgtccctgatgaggttgggcggcttgaggttcttcgtattcacactaagaacatgaagctagctgaagatgttgatttggaactcattgcgaaggatactcatggatatgttggtgctgatcttgctgccctttgcactgaggctgctcttcagtgcattcgtgagaagatggatatcatagatcttgaggacgagacaatagatgctgagatattgaactcgatggctgtcacaaatgaccatttcaaaaccgcgcttggtacaagcaacccatctgctcttcgtgaaactgttgttgaagttcctaatgtctcatgggaggacattggtgggctggagaatgtcaagagggagctgcaggagcctatttatgtacttgaattcctgcagactgtccaatatccagtggagcacccagagaagttcgagaagtttggaatgtctccatccaaaggagttctgttctatggccctcctggctgtggtaagaccttgttggccaaggcaattgccaatgagtgccaggcaaacttcatcagtgtgaagggcccagagttgctcaccatgtggtttggagagagtgaagctaatgttcgtgagatatttgacaaggcccgccagtctgcgccatgtgtgctcttcttcgacgagcttgactcaattgctactcagagaggaagcagtgtgggtgatgctggaggtgcagctgatagggtgctgaatcagctgttgacagagatggatggcatgaatgccaagaagactgttttcattattggggctacaaacaggcctgacatcatagatccggccttgcttaggccagggcgtctcgatcagctgatctacattccactgcctgatgagcaatctaggctccaaattttcaaagcttgcctcaggaagtcccctgtggcgaaggatgtggacttgaacgctcttgccaagtacacccaaggcttcagtggtgcagatattacagaaatctgtcagcgtgcatgcaaatatgcgattaagagagaacatcgagaagctcatccgtattacaacaaactagatgacattgagagggagaggcggagtaaggagaaccctgaagcgatggaggaagatgaagtcgacgacattgctgagatcaaggcagcccacttcgaggagtcgatgaagtacgcgcgccgcagtgtcagcgatgccgacatccgcaagtaccaggcgttcgcccagacgttgcagcagtctcgcgggtttggcagtgagttccgtttcgagcggacagaagctggtgctggagctgcggctgatccttttgcgtctgctgccgccgtcgctgatgatgacgatttatatagttag

SEQ ID NO: 688 - protein, 826 aa, Oryza sativa
MASQGEPSSSADPKGKKDYSTAILERKKSPNRLVVDEATNDDNSVVALHPDTMERLQLFRGDTVLLKGKKRKDTICIVLADETCEEPKIRMNKVVRKNLRVRLGDVVSVHQCQDVKYGKRVHILPIDDTVEGITGNLFDAFLKPYFLEAYRPVRKGDLFLVRGGMRSVEFKVIETDPTEYCIVAPDTEIFCDGEPIKREDEERLDEVGYDDVGGVRKQMAQIRELVELPLRHPQLFKSIGVKPPKGILLYGPPGSGKTLIARAVANETGAFFFLINGPEIMSKLAGESESNLRKAFEEAEKNAPSIIFIDEIDSIAPKREKTNGEVERRIVSQLLTLMDGLKARSHVIVMGATNRPNSIDPALRRFGRFDREIDIGVPDEVGRLEVLRIHTKNMKLAEDVDLELIAKDTHGYVGADLAALCTEAALQCIREKMDIIDLEDETIDAEILNSMAVTNDHFKTALGTSNPSALRETVVEVPNVSWEDIGGLENVKRELQEPIYVLEFLQTVQYPVEHPEKFEKFGMSPSKGVLFYGPPGCGKTLLAKAIANECQANFISVKGPELLTMWFGESEANVREIFDKARQSAPCVLFFDELDSIATQRGSSVGDAGGAADRVLNQLLTEMDGMNAKKTVFIIGATNRPDIIDPALLRPGRLDQLIYIPLPDEQSRLQIFKACLRKSPVAKDVDLNALAKYTQGFSGADITEICQRACKYAIKREHREAHPYYNKLDDIERERRSKENPEAMEEDEVDDIAEIKAAHFEESMKYARRSVSDADIRKYQAFAQTLQQSRGFGSEFRFERTEAGAGAAADPFASAAAVADDDDLYS

SEQ ID NO: 689 - DNA, 2712 bp, Zea mays
  CDS (104)..(2536)
acgcgggccgcatctcgcattctcgccggtgctgctgcaattaacgccgcctccggccaaccacccgaaacctacctccgccgccgtcgtcgccaccgtcaacatggcgagccaaggggagccctcggcctctgcttccgatccgaaggagaagaaggactactcgacggcgatactagagaggaaaaagtcaccgaaccgccttgtcgtcgacgaggccaccaacgacgataactccgtcgtcgcactgcaccctgacaccatggagaggctgcagctcttccgcggcgatactgtgctcctcaagggtaagaagaggaaagacactgtttgcattgtccttgcggatgaaacctgtgaggagccaaaggttcggatgaacaaggttgtccgccagaacctgagggtgaggcttggtgatgtggtttctgtccaccagtgccaggatgtgaaatatgggaagcgtgtgcacattcttccaattgatgatacagttgaaggcattacagggaacctgtttgatgccttcttgaaaccatacttcctagaagcatacaggcccgtgaggaaaggagacctcttccttgtcaggggtggaatgagaagcgtggaattcaaagtgatagagactgacccttctgaatattgtatcgttgccccagatactgaaatattttgtgatggggagcctattaagagagaggatgaggagcgtcttgatgaagttggttatgatgatgttggtggagttagaaagcaaatggcccaaatcagagagcttgttgagcttccactacgccatcctcagcttttcaaatctattggtgtgaagccaccaaagggcatattgctgtatgggccacctggttctggaaagactcttattgctcgtgctgttgctaatgagactggagcctttttctttctgatcaatggcccagagattatgtcgaagttagcaggagagagtgagagcaatctcagaaaggcatttgaagaagcagagaagaatgctccatctatcattttcattgatgaaattgattccattgcacccaagagagaaaagaccaatggagaagtagaacgtcgtattgtttcacagctactgactcttatggatggactcaaatctcgttcccatgttattgttatgggtgctacaaaccggccaaacagcatcgatcctgctcttagaagatttggaaggtttgaccgggaaattgacattggagttcctgatgaagttggccggcttgaggttctccgtattcacactaagaacatgaagctagctgaagatgttaatttggaactcatttcaaaggatacccatggatacgttggtgctgatcttgctgctctttgtactgaggctgctcttcagtgcattcgtgagaagatggacatcatagatcttgaggatgagacaatagatgcagagatattgaactcgatggctgttacaaatgaccatttcaagactgcgcttggaacaagcaacccatctgctctccgtgaaactgttgttgaagtcccaaatgtctcttgggaggatattggtgggctggagaatgtcaagagggagctccaggagactgttcaatatcctgtggaacatccagagaagttcgagaagtttggcatgtctccatccaaaggagttctgttttatggtcctcctggttgtggtaaaaccttgttggcgaaggcaattgccaacgagtgccaggctaacttcatcagtgtcaagggtcctgaattgcttaccatgtggtttggtgagagtgaagccaacgtccgcgaaatttttgataaggctcgccaatctgctccttgtgtcctcttctttgatgagcttgactcaattgcgacgcagagaggaagtagtgtgggtgatgctggaggcgcggctgatagagtgcttaatcagctactgaccgagatggatggcatgaacgccaagaaaactgtgtttattattggtgctacaaacaggcctgacatcattgatcctgctcttctgaggccagggcgtcttgaccagctgatctacattccactgcctgatgagcagtctaggctccagatcttcaaggcctgcctaaggaagtcccctgtggcaaaggatgtggacctgaatgctcttgctaagtacacacaagggttcagtggagcagatatcacagaaatttgccagcgtgcgtgcaaatatgcaatcagagagaacattgagaaggacattgagagggaaaggcggatgaaggacaaccctgaggcgatggaggaagatgaagtggacgagattgccgagatcaaagcagctcacttcgaggagtctatgaagtatgctcggcgcagtgtcagtgatgctgatatccgcaagtaccaggcgttcgcccagacgttgcagcagtcccgtgggttcggcagcgagttccgcttctcagagcagtcggcgacagctggtgctgctgcagccgatccgtttgcttcggctggtgctgcggctgacgatgacgatctatacagctaggtgtcctgttgggttggttctgggttgtgcaatatcagtctcatcagtcatctgtttaaaactctgattatacttagacacgggatgtcatgcaatgatatttgttttccgtacatttggacgttgagataatgcctgtttattttaaaaaaaaaaaaaaaaaaaaaaaaaaaaaa

SEQ ID NO: 690 - protein, 810 aa, Zea mays
MASQGEPSASASDPKEKKDYSTAILERKKSPNRLVVDEATNDDNSVVALHPDTMERLQLFRGDTVLLKGKKRKDTVCIVLADETCEEPKVRMNKVVRQNLRVRLGDVVSVHQCQDVKYGKRVHILPIDDTVEGITGNLFDAFLKPYFLEAYRPVRKGDLFLVRGGMRSVEFKVIETDPSEYCIVAPDTEIFCDGEPIKREDEERLDEVGYDDVGGVRKQMAQIRELVELPLRHPQLFKSIGVKPPKGILLYGPPGSGKTLIARAVANETGAFFFLINGPEIMSKLAGESESNLRKAFEEAEKNAPSIIFIDEIDSIAPKREKTNGEVERRIVSQLLTLMDGLKSRSHVIVMGATNRPNSIDPALRRFGRFDREIDIGVPDEVGRLEVLRIHTKNMKLAEDVNLELISKDTHGYVGADLAALCTEAALQCIREKMDIIDLEDETIDAEILNSMAVTNDHFKTALGTSNPSALRETVVEVPNVSWEDIGGLENVKRELQETVQYPVEHPEKFEKFGMSPSKGVLFYGPPGCGKTLLAKAIANECQANFISVKGPELLTMWFGESEANVREIFDKARQSAPCVLFFDELDSIATQRGSSVGDAGGAADRVLNQLLTEMDGMNAKKTVFIIGATNRPDIIDPALLRPGRLDQLIYIPLPDEQSRLQIFKACLRKSPVAKDVDLNALAKYTQGFSGADITEICQRACKYAIRENIEKDIERERRMKDNPEAMEEDEVDEIAEIKAAHFEESMKYARRSVSDADIRKYQAFAQTLQQSRGFGSEFRFSEQSATAGAAAADPFASAGAAADDDDLYS

SEQ ID NO: 691 - DNA, 2454 bp, Oryza sativa (japonica cultivar-group)
  CDS (1)..(2454)
atggcgagccagggggagccctcgtcgtcggccgatccgaaggggaagaaggactactcgacggcgatcctggagaggaagaagtcgccgaaccggctggtggtggacgaggccaccaatgacgacaactccgtcgtcgcgctgcacccggacaccatggagaggctgcagctcttccgcggcgacaccgtcctcctcaagggcaagaagaggaaagatactatttgcattgtccttgcggacgaaacctgtgaggagcccaagattaggatgaacaaggttgtcaggaagaacctgagggtgcgacttggtgatgttgtttctgtccaccagtgccaggatgtgaaatacgggaaacgtgtgcacattcttccgattgatgatacagttgaaggcattaccgggaacctgtttgatgccttcctgaagccatacttcttagaagcataccgcccagtgaggaaaggagatctcttccttgtcaggggtggaatgagaagtgtggaattcaaagtcatagagactgaccctactgagtattgcatcgttgcaccagatacagaaatattctgtgatggggagcctattaagagggaagatgaggaaaggcttgatgaggttggatatgatgatgttggtggagttagaaagcagatggctcaaatcagagagcttgttgagcttccactgcgtcatccccaacttttcaaatccattggtgtgaagccaccaaagggcatattgctgtatggaccacctggttctggaaaaaccctcattgctcgtgctgttgcaaatgagactggagcctttttctttttgattaatggacctgagattatgtcaaagctagctggagagagtgagagcaatctcaggaaggcatttgaagaagcagagaagaatgcaccatctatcattttcattgatgagattgattccattgctcccaagagagagaagaccaatggagaagtggaacgtcgtattgtttcacagctgttgactcttatggatggactcaaagctcgttctcatgttattgttatgggtgctacaaaccgtcccaacagcattgatcctgctcttcggaggtttggaaggtttgaccgtgagattgacattggtgtccctgatgaggttgggcggcttgaggttcttcgtattcacactaagaacatgaagctagctgaagatgttgatttggaactcattgcgaaggatactcatggatatgttggtgctgatcttgctgccctttgcactgaggctgctcttcagtgcattcgtgagaagatggatatcatagatcttgaggacgagacaatagatgctgagatattgaactcgatggctgtcacaaatgaccatttcaaaaccgcgcttggtacaagcaacccatctgctcttcgtgaaactgttgttgaagttcctaatgtctcatgggaggacattggtgggctggagaatgtcaagagggagctgcaggagcctatttatgtacttgaattcctgcagactgtccaatatccagtggagcacccagagaagttcgagaagtttggaatgtctccatccaaaggagttctgttctatggccctcctggctgtggtaagaccttgttggccaaggcaattgccaatgagtgccaggcaaacttcatcagtgtgaagggcccagagttgctcaccatgtggtttggagagagtgaagctaatgttcgtgagatatttgacaaggcccgccagtctgcgccatgtgtgctcttcttcgacgagcttgactcaattgctactcagagaggaagcagtgtgggtgatgctggaggtgcagctgatagggtgctgaatcagctgttgacagagatggatggcatgaatgccaagaagactgttttcattattggggctacaaacaggcctgacatcatagatccggccttgcttaggccagggcgtctcgatcagctgatctacattccactgcctgatgagcaatctaggctccaaattttcaaagcttgcctcaggaagtcccctgtggcgaaggatgtggacttgaacgctcttgccaagtacacccaaggcttcagtggtgcagatattacagaaatctgtcagcgtgcatgcaaatatgcgattagagagaacatcgagaaggacattgagagggagaggcggagtaaggagaaccctgaagcgatggaggaagatgaagtcgacgacattgctgagatcaaggcagcccacttcgaggagtcgatgaagtacgcgcgccgcagtgtcagcgatgccgacatccgcaagtaccaggcgttcgcccagacgttgcagcagtctcgcgggtttggcagtgagttccgtttcgagcggacagaagctggtgctggagctgcggctgatccttttgcgtctgctgccgccgtcgctgatgatgacgatttatatagttag

SEQ ID NO: 692 - protein, 817 aa, Oryza sativa (japonica cultivar-group)
MASQGEPSSSADPKGKKDYSTAILERKKSPNRLVVDEATNDDNSVVALHPDTMERLQLFRGDTVLLKGKKRKDTICIVLADETCEEPKIRMNKVVRKNLRVRLGDVVSVHQCQDVKYGKRVHILPIDDTVEGITGNLFDAFLKPYFLEAYRPVRKGDLFLVRGGMRSVEFKVIETDPTEYCIVAPDTEIFCDGEPIKREDEERLDEVGYDDVGGVRKQMAQIRELVELPLRHPQLFKSIGVKPPKGILLYGPPGSGKTLIARAVANETGAFFFLINGPEIMSKLAGESESNLRKAFEEAEKNAPSIIFIDEIDSIAPKREKTNGEVERRIVSQLLTLMDGLKARSHVIVMGATNRPNSIDPALRRFGRFDREIDIGVPDEVGRLEVLRIHTKNMKLAEDVDLELIAKDTHGYVGADLAALCTEAALQCIREKMDIIDLEDETIDAEILNSMAVTNDHFKTALGTSNPSALRETVVEVPNVSWEDIGGLENVKRELQEPIYVLEFLQTVQYPVEHPEKFEKFGMSPSKGVLFYGPPGCGKTLLAKAIANECQANFISVKGPELLTMWFGESEANVREIFDKARQSAPCVLFFDELDSIATQRGSSVGDAGGAADRVLNQLLTEMDGMNAKKTVFIIGATNRPDIIDPALLRPGRLDQLIYIPLPDEQSRLQIFKACLRKSPVAKDVDLNALAKYTQGFSGADITEICQRACKYAIRENIEKDIERERRSKENPEAMEEDEVDDIAEIKAAHFEESMKYARRSVSDADIRKYQAFAQTLQQSRGFGSEFRFERTEAGAGAAADPFASAAAVADDDDLYS

SEQ ID NO: 693 - DNA, 1737 bp, Oryza sativa (japonica cultivar-group)
  CDS (1)..(1737)
atggaagaggttaggggcagggagagcaaagaccaccgcggcggcggcggcggcggcggaggtgatggggacggcgagcggacgggacggtggcgcgccgaggaggtcatcgctgggaaccgcgcggttctggaggctctccgggagctcgtgatgtatcctgtcctctacgcacgggaggcccgcgtgctcggcctcaattttcccagaggattgctgctccacggcccctctggcactggaaagaaaagcatggtccgagctgttgttcgagaatgtaatgcccacctcacagtgattgattcaatttctgtgcataaaccccacgctggagagggggagaagttcatgcgagaggcttttactgaagcatattcccaggcatcacagggtagaccagccgtgatattcattgatgaacttgatgacatatgtccaccgcgtggcagtaggagagagcaagggtcccgcattgttggtcagctgttgactctgatggacgggaagtcatcaaagctgcttccccacctagttgttgttgcatctgctaccagggtggatgctattgagtcagcactgcgaaggcctgggcgttttgactcagagatagaggttactgttcctacagcagaagaaaggttcgagattcttaagctttataccaagaatctacatcttggtgaatgtgttgatcttcaatctgttgctgcatcctgcaatggttatgttggagctgatttacaagctttatgtcgagaagctgcaagacgtgcttatggtagattatcaagctcatcagagagtgagaatgtgctaacgctaatcatggaggattgggagtctgctaaatctgtggccaaaaatagtgtgacaagaggggtaactaaagaaattccagctgtttcatgggatgatataggaggtttgaaagctgttaagaaaaaacttcagcaagctgttgaatggcccatcaagcatgctgcttcatttgatagacttggaatatcacctatccgtggggtgctattgcatggtccaccagggtgctcaaagactacccttgcaaaggctgctgctcatgctgcccaagcttctttcttttcattaagtggtgctgagttatactccaagtatgttggtgaaggtgaagctttgttgcgacgtacattccagatggcacgtcttgcttctccaagcattatattttttgatgaggctgatgcaattgcccctaaaagaactggtcccagcgggaactctagtggcaatgccacggttggagaaagactcttatcaactctattgacggaaatggatggtttagaactggctacgggaattattgtattggctgctactaatcgcccaaatgcaattgatgctgctcttctgcgcccagggcgtttcgatatggttttgtatgttccaccaccagatgcggaaggtcgatatgaaatactacgcatccatacacgcaaaatgccattaggagatgatgtggatctttggaaggtagcagagcgtaccgagcttttcacgggcgcagatcttgaaggcctgtgcagggaggcgggaatggctgccttgagggaaagtctgaggtcagagcgttttgtatgtgacgatattcacttccaggccgcgctaagatccttgcgtccatcacttacacaatcagtggttgatgagtactcaaatgcagccatccatggtccattgacgaggagaaaacactaa

SEQ ID NO: 694 - protein, 578 aa, Oryza sativa (japonica cultivar-group)
MEEVRGRESKDHRGGGGGGGGDGDGERTGRWRAEEVIAGNRAVLEALRELVMYPVLYAREARVLGLNFPRGLLLHGPSGTGKKSMVRAVVRECNAHLTVIDSISVHKPHAGEGEKFMREAFTEAYSQASQGRPAVIFIDELDDICPPRGSRREQGSRIVGQLLTLMDGKSSKLLPHLVVVASATRVDAIESALRRPGRFDSEIEVTVPTAEERFEILKLYTKNLHLGECVDLQSVAASCNGYVGADLQALCREAARRAYGRLSSSSESENVLTLIMEDWESAKSVAKNSVTRGVTKEIPAVSWDDIGGLKAVKKKLQQAVEWPIKHAASFDRLGISPIRGVLLHGPPGCSKTTLAKAAAHAAQASFFSLSGAELYSKYVGEGEALLRRTFQMARLASPSIIFFDEADAIAPKRTGPSGNSSGNATVGERLLSTLLTEMDGLELATGIIVLAATNRPNAIDAALLRPGRFDMVLYVPPPDAEGRYEILRIHTRKMPLGDDVDLWKVAERTELFTGADLEGLCREAGMAALRESLRSERFVCDDIHFQAALRSLRPSLTQSVVDEYSNAAIHGPLTRRKH

SEQ ID NO: 695 - DNA, 2547 bp, Oryza sativa (japonica cultivar-group)
  CDS (1)..(2547)
atggccgacgccgacgtctcttcctccaagacgacgacggcgagggattacagcacggcgatcctggagtgcgccaagaagaagtccccgaaccggctgatggcggacgacgccgagggcggggtggccgtcgacaactccacggtgacgctcagcgaggcgaccatggaggagctcggcatcttccgcggcgacctggtgaccctccgcgggaggcggcgccgcgaggccgtctgctacgcgcagaaggacgagtcgtgccccgacggccgcctccgcctcagccgcggcgtccgcagcaacctccacgtccgcctcggcgacctcgtcaccgtcaagccgtgccccaccattaggaacgccaagagggtgcagctccgccccttcgacgactctgtcgagggcatctccggtgatctgttcgagccctacctcaaaccgtacttcatggatgcgttgcggccggtgaagaagggcgaccggttcctggtgcgcggccacatgcacgccgtggagttcaaggtgatggacacggagccgaacaacgagcccgtgatcgtggcgggcgacacggagatcttctgcgacgagggcgacccggtgaagcgcgaggacgaggagcggctcgacgggccgggctacgacgacgtcggcggcgtccgcaagcagctggcgcagatcagggagctcgtcgagctgcccctgcgccaccccaagctgttccagacgctcggcgtgcgcccgcccaagggcatcctcctctacgggccccccggcaccggcaagacgctgcttgcgcgcgccatcgccgccgagtccggcgcccacttcgtcgtcgtcaacgggccggagatcatgtccgggatgcccggcgagagcgaggccaacctgcgcgccgtgttcgccgaggcggacgccgcggcgccgtccatcgtgttcatggacgagatcgactccatcgcgcccagccgcgagaaggcgcacggcgaggtggagcgccgcgtcgtgtcgcagctgctcacgctcatggacggcctccgcccgcgggcccaggtgatcgtcatcggcgccaccaaccgccccaacagcctcgacccggcgctccgccgcttcggccgcttcgaccgcgagctcgacatcggcgtccccgacgagctcggccgcctcgagatcctccgcatccacaccaagaacatgccgctctccgacgacgtcgacctcgagcgcgtcggcaaggacacccacgggttcgtcggctccgacctcgcctcgctctgctccgaggccgccatgcagtgcatccgggagaagctggacatcatcgacatcgagaacgacaccatcgacgtggagatcctcaactcgctgaccgtcaccatggaccacctcaagttcgccatggaggtcaccaagccctccgccctgcgcgagaccgggatcgtcgaggtgcccaaggtgtcgtgggacgacatcggcggcctgggcgaggtcaagcgcgagctccaggagacggtgcagtacccggtggagcacccggagatgttcgacctgtttggcatgtcgccgtcgcgcggcgtgctcttctacggcccgccggggtgcggcaagacgatgatggccaaggccatcgccaaggagtgcaaggccaacttcatcagcatcaaggggcccgagctgctcaccatgtggttcggcgagagcgagggcaacgtccgcaacctgttcgacaaggcgcggcagtcggcgccgtgcatcctcttcttcgacgagctcgactccatcgccgtcaagcgcggcaacagcgtcggcgacgccggcggcacgccggaccgcgtgctcaaccagctgctcaccgagatggacggcatcaacgccaagaagacggtgttcgtcatcggcgccaccaaccggccggacatcatcgacccggcgatgctccggccgggccgcctcgaccagctcatctacatcccgctcccggacgcctcgtcgcggctggagatcttcagggcgaacctccgcaaggcgcccatgtcccgccacgtcgacctgccggccatggccgcctccaccgacgggttcagcggcgccgacatcaaggagatctgccagcgcgcgtgcaagctcgcggtgcgcgaggtggtccagaagagcaccctggtcgggaaggccctggcaatggcgggcgcggagctcaccgtggaccacttcaagagcgccatgaagcacgcaaggaagagcgtcagcgagctcgacgtcatcaagtacgagtacttcaagcacaagttcagcggcggcatccccgacgaggaggaggcgccggcgacggagccggagctgccggtgggacagctgaggttggtggcgaagccgaagacgaagacgaaggcggagctagaagcagaggcggaggctgcggcaaaagcgaaggcggaggcagaggcgaaggcgaaagcaaagctgaaggggaaggcggtggccgtggatgacgacgacgacgactctacgtactccatggattcgatggacgaggacttgctgtattag

SEQ ID NO: 696 - protein, 848 aa, Oryza sativa (japonica cultivar-group)
MADADVSSSKTTTARDYSTAILECAKKKSPNRLMADDAEGGVAVDNSTVTLSEATMEELGIFRGDLVTLRGRRRREAVCYAQKDESCPDGRLRLSRGVRSNLHVRLGDLVTVKPCPTIRNAKRVQLRPFDDSVEGISGDLFEPYLKPYFMDALRPVKKGDRFLVRGHMHAVEFKVMDTEPNNEPVIVAGDTEIFCDEGDPVKREDEERLDGPGYDDVGGVRKQLAQIRELVELPLRHPKLFQTLGVRPPKGILLYGPPGTGKTLLARAIAAESGAHFVVVNGPEIMSGMPGESEANLRAVFAEADAAAPSIVFMDEIDSIAPSREKAHGEVERRVVSQLLTLMDGLRPRAQVIVIGATNRPNSLDPALRRFGRFDRELDIGVPDELGRLEILRIHTKNMPLSDDVDLERVGKDTHGFVGSDLASLCSEAAMQCIREKLDIIDIENDTIDVEILNSLTVTMDHLKFAMEVTKPSALRETGIVEVPKVSWDDIGGLGEVKRELQETVQYPVEHPEMFDLFGMSPSRGVLFYGPPGCGKTMMAKAIAKECKANFISIKGPELLTMWFGESEGNVRNLFDKARQSAPCILFFDELDSIAVKRGNSVGDAGGTPDRVLNQLLTEMDGINAKKTVFVIGATNRPDIIDPAMLRPGRLDQLIYIPLPDASSRLEIFRANLRKAPMSRHVDLPAMAASTDGFSGADIKEICQRACKLAVREVVQKSTLVGKALAMAGAELTVDHFKSAMKHARKSVSELDVIKYEYFKHKFSGGIPDEEEAPATEPELPVGQLRLVAKPKTKTKAELEAEAEAAAKAKAEAEAKAKAKLKGKAVAVDDDDDDSTYSMDSMDEDLLY

SEQ ID NO: 697 - DNA, 2448 bp, Arabidopsis thaliana
  CDS (1)..(2448)
atggcgaatcaagctgaatcatctgattcgaaggggacgaagaaggattttagcaccgcgattctggagaaaaagaaggcagcgaatcgtttggttgtggatgaagccattaacgatgataactccgtcgtttctcttcaccctgataccatggagaagctacagctttttcgtggtgatactatcttaatcaagggaaagaagaggaaggatactgtgtgtattgctttagctgatgagacatgtgatgaaccaaaaattagaatgaacaaggttgttaggtctaatctcagagttaggcttggggatgttatttctgttcatcaatgtcctgatgtcaagtatgggaaccgtgttcacatcttacctttagatgataccattgaaggagtaagtggcaatatatttgatgcataccttaaaccttatttcttagaggcatatcgtccggtgaggaagggcgatcttttcctagttagaggagggatgagaagtattgagtttaaggttattgaaactgatcctgctgagtactgtgtggttgctccagatacagaaattttctgtgaaggtgaaccgataaagagagaggatgaggagaggttggatgaagttgggtatgatgatgttggtggtgtcaggaaacaaatggctcagattcgtgaacttgttgagctcccattgaggcatccacagctcttcaagtctattggtgtgaaacctcccaaaggaatcttgctctatggccctcctggttctgggaagacacttattgcccgtgctgttgctaatgagactggtgcatttttcttctgtatcaatggtcccgagatcatgtcgaagctagctggtgagagtgaaagtaacctcaggaaagcgtttgaggaagctgagaagaatgccccttcgatcatattcattgatgagatcgattcgattgctccaaaaagagagaagactcacggagaagttgaaagacggattgtatcccagctcttgacacttatggatggtcttaaatccagagcccatgtgattgttatgggagctaccaaccgtcccaacagcattgaccctgctttgagaagatttggacgttttgatagagaaattgatattggtgttcctgatgagattggtcgtcttgaagttctcaggattcacaccaagaacatgaagcttgcggaagatgttgatttggaaagagtatctaaagacacccatgggtatgttggtgctgatcttgcagcattatgcactgaagctgctctccaatgcattagggagaagatggatgtaattgacctagatgacgaggagatagatgctgaaattctcaattctatggctgtcagtaatgatcatttccagactgcccttggtaacagcaatccttcagctctacgtgagactgtcgttgaggtgcctaatgtgtcttgggaggacattggtggtcttgagaatgtcaagagggagctccaagagactgttcaatatccagtggagcatcctgagaaattcgagaagtttgggatgtcaccgtctaaaggagtcctattctatggcccccctggttgtggaaagaccctcttggctaaggctattgcgaacgagtgtcaagccaacttcattagtatcaagggtcctgagctcctcacaatgtggtttggagagagtgaagccaatgtgagagagatattcgacaaggcacgacagtctgccccttgtgttcttttctttgatgagctggactccatcgccactcagagagggaacagtgttggagatgctggtggtgcagcagatagagtattgaaccagcttcttacggagatggatggaatgaatgctaagaagacggtcttcatcatcggagctacaaacagaccagacattattgatcctgcacttctgcgtcctggtcgtctcgatcagctcatctacattcctcttcctgatgaggagtctcgttaccagatctttaagtcttgcttgaggaaatcacctgtggcgaaagatgttgacctgagggctcttgctaagtacacccaaggcttcagtggtgcggacatcacagagatttgccagcgttcttgcaagtatgcgatcagagaaaacatcgagaaggatattgagaaggagaggaagagagcagagtcgccagaagcaatggaagaggatgaggaggagattgcagagattaaagctggtcactttgaggaatccatgaaatacgctaggagatcagtgagtgatgcagacattcgcaagtatcaggcttttgctcagactctccagcaatcacgtgggtttggaagcgagttcaggtttccagatgcgccgacagggactactggagctttccctggagctgctgccacagttgggggagtcgacccgtttgccacatccggaggagcagcggatgatgatgatctctacagttga

SEQ ID NO: 698 - protein, 815 aa, Arabidopsis thaliana
MANQAESSDSKGTKKDFSTAILEKKKAANRLVVDEAINDDNSVVSLHPDTMEKLQLFRGDTILIKGKKRKDTVCIALADETCDEPKIRMNKVVRSNLRVRLGDVISVHQCPDVKYGNRVHILPLDDTIEGVSGNIFDAYLKPYFLEAYRPVRKGDLFLVRGGMRSIEFKVIETDPAEYCVVAPDTEIFCEGEPIKREDEERLDEVGYDDVGGVRKQMAQIRELVELPLRHPQLFKSIGVKPPKGILLYGPPGSGKTLIARAVANETGAFFFCINGPEIMSKLAGESESNLRKAFEEAEKNAPSIIFIDEIDSIAPKREKTHGEVERRIVSQLLTLMDGLKSRAHVIVMGATNRPNSIDPALRRFGRFDREIDIGVPDEIGRLEVLRIHTKNMKLAEDVDLERVSKDTHGYVGADLAALCTEAALQCIREKMDVIDLDDEEIDAEILNSMAVSNDHFQTALGNSNPSALRETVVEVPNVSWEDIGGLENVKRELQETVQYPVEHPEKFEKFGMSPSKGVLFYGPPGCGKTLLAKAIANECQANFISIKGPELLTMWFGESEANVREIFDKARQSAPCVLFFDELDSIATQRGNSVGDAGGAADRVLNQLLTEMDGMNAKKTVFIIGATNRPDIIDPALLRPGRLDQLIYIPLPDEESRYQIFKSCLRKSPVAKDVDLRALAKYTQGFSGADITEICQRSCKYAIRENIEKDIEKERKRAESPEAMEEDEEEIAEIKAGHFEESMKYARRSVSDADIRKYQAFAQTLQQSRGFGSEFRFPDAPTGTTGAFPGAAATVGGVDPFATSGGAADDDDLYS

SEQ ID NO: 699 - DNA, 2508 bp, Saccharomyces cerevisiae
  CDS (1)..(2508)
atgggtgaagaacataaaccacttttggacgcctcgggtgtcgaccctcgtgaggaggataaaaccgccaccgccattttaagaagaaagaagaaggacaacatgcttttggtggacgatgctatcaatgatgacaattctgtcattgctattaattctaacaccatggacaaattggaattgttccgtggtgacaccgttctcgttaagggcaagaagagaaaagatactgtcttaattgtgttgatcgatgacgaattagaagacggagcatgcaggataaaccgtgtagttcgtaacaatttacgtattaggctgggtgatttagttacaattcatccttgccccgatatcaaatacgctactagaatttctgtgttaccaattgctgatacgatcgaaggtataactggtaatcttttcgatgtttttttgaagccttattttgtggaagcctacagaccagtgaggaaaggcgaccattttgttgtcagaggcggtatgagacaagtcgaattcaaggttgtggatgtcgaacctgaagaatatgccgtcgttgctcaggatactattattcactgggaaggtgagccaatcaacagggaagatgaagaaaataatatgaatgaggtgggttacgatgatattggtggttgtcgtaagcaaatggctcaaattagggaaatggttgaactaccattgagacatcctcagttgttcaaggctatcggtatcaagccaccaagaggtgttttgatgtatggtccccctggtactggtaaaaccttgatggcaagagctgttgctaatgagaccggtgccttttttttcttaattaatggtccagaagtcatgtcaaaaatggctggtgaatcagagtctaacttaagaaaggcctttgaagaagccgaaaagaacgctccagccatcatttttatcgatgaaatcgattctatagctccaaagagagacaagactaatggtgaagttgagagaagagttgtctctcaattgttaactttaatggatggtatgaaggcaagatctaatgttgttgtcattgctgctaccaatagaccaaattcgattgatcccgctttaagaagatttggtagattcgatcgtgaagtcgacattggtatcccagatgctacaggtagacttgaagttctacgtattcacaccaagaacatgaagttggctgatgatgttgatttggaagcattggctgctgaaacacacggttacgtgggtgctgatattgcctctttgtgttctgaagctgccatgcaacagatccgtgaaaaaatggacttgatagatttagatgaagatgaaattgatgcagaggtgctcgattctttaggagtcaccatggacaacttcagattcgcattgggcaattcaaacccatctgcattgcgtgaaaccgttgttgaaagtgtcaatgttacttgggatgacgttggtggcctagatgaaatcaaggaggaattgaaggaaactgtagaatacccagtcttacatccagaccaatacacaaagtttgggttatcaccatcaaagggtgtgttgttctacggtccaccaggtacaggtaaaactttgttagcaaaagctgtagctactgaggtttctgccaactttatctcagtcaaaggtccagaattattgagtatgtggtatggtgaatcggaatctaacatccgtgatatttttgataaggcaagagcagctgcaccaaccgtcgtttttctagatgaattagactccattgccaaggcaagaggtggttccttgggtgatgctggtggtgcttcggatagagtcgtcaaccaactattaacagaaatggatggtatgaatgctaagaaaaatgtgttcgtgattggtgccaccaataggccagatcaaattgatcctgctattttaagacctggcagattggatcaattaatttatgttccattgccagatgaaaacgctagattatctattctaaatgctcaattaaggaaaacaccactagaaccagggctagagttaactgcgattgccaaggccactcaaggtttctctggtgctgatttactctatattgtgcagagggctgctaaatacgctatcaaggattctatcgaagctcacagacaacacgaagctgaaaaggaagtgaaagtagaaggtgaagacgtggaaatgacagatgagggagcaaaggctgaacaagaaccagaagtagatcctgttccatatattacaaaggagcatttcgcagaagctatgaagaccgctaaacgttctgtttcagatgctgaattgcgtcgttatgaagcatactcacagcaaatgaaagcatctagaggtcaattcagtaatttcaactttaatgacgctccattaggtactacggctacggacaatgctaacagtaataatagtgctccaagtggagcaggtgctgcatttggttctaatgcggaggaagatgatgatttgtatagttag

SEQ ID NO: 700 - protein, 835 aa, Saccharomyces cerevisiae
MGEEHKPLLDASGVDPREEDKTATAILRRKKKDNMLLVDDAINDDNSVIAINSNTMDKLELFRGDTVLVKGKKRKDTVLIVLIDDELEDGACRINRVVRNNLRIRLGDLVTIHPCPDIKYATRISVLPIADTIEGITGNLFDVFLKPYFVEAYRPVRKGDHFVVRGGMRQVEFKVVDVEPEEYAVVAQDTIIHWEGEPINREDEENNMNEVGYDDIGGCRKQMAQIREMVELPLRHPQLFKAIGIKPPRGVLMYGPPGTGKTLMARAVANETGAFFFLINGPEVMSKMAGESESNLRKAFEEAEKNAPAIIFIDEIDSIAPKRDKTNGEVERRVVSQLLTLMDGMKARSNVVVIAATNRPNSIDPALRRFGRFDREVDIGIPDATGRLEVLRIHTKNMKLADDVDLEALAAETHGYVGADIASLCSEAAMQQIREKMDLIDLDEDEIDAEVLDSLGVTMDNFRFALGNSNPSALRETVVESVNVTWDDVGGLDEIKEELKETVEYPVLHPDQYTKFGLSPSKGVLFYGPPGTGKTLLAKAVATEVSANFISVKGPELLSMWYGESESNIRDIFDKARAAAPTVVFLDELDSIAKARGGSLGDAGGASDRVVNQLLTEMDGMNAKKNVFVIGATNRPDQIDPAILRPGRLDQLIYVPLPDENARLSILNAQLRKTPLEPGLELTAIAKATQGFSGADLLYIVQRAAKYAIKDSIEAHRQHEAEKEVKVEGEDVEMTDEGAKAEQEPEVDPVPYITKEHFAEAMKTAKRSVSDAELRRYEAYSQQMKASRGQFSNFNFNDAPLGTTATDNANSNNSAPSGAGAAFGSNAEEDDDLYS

SEQ ID NO: 701 - DNA, 2433 bp, Zea mays
  CDS (1)..(2433)
atggcgagccaaggcgagccgtcttcctccgatccgaaggggaagaaggattactctacggcgatcctggagaggaagaagtcgccgaaccggctggtggtcgacgaggccaccaatgatgacaactccgtcgtcgctctgcacccggacaccatggagaggctccagctcttccgcggtgacactgtcctgatcaagggtaagaagagaaaggacactatctgcattgtgctcgcagacgagacatgtgaggagccaaaggtccggatgaacaagattgtcaggaagaacttgagggtacggcttagtgatgtggtatctgtccatcaatgcccagatgtcaaatacgggaagcgtgtgcacatacttccaattgatgacaccattgaaggcatcactggcaacttatttgatgcctttctaaaaccatacttccttgaagcctatcgtcctttgaggaaaggagaccttttcctagtcaggggtggcatgagaagtgtagaattcaaagtcatagagactgatcctgcagagtattgtatcgttgcaccagatacagaaatattttgtgagggtgagcctattaagagggaggacgaggaaagactcgatgaggttggctatgacgatgttggtggagttagaaagcagatggcccaaatcagggaactggttgaacttccattgcgtcatccccagcttttcaagtctattggtgtgaaaccaccaaagggcatattgctgtttgggcctcctggctctggcaagacccttattgctagagctgtagctaatgagacaggtgctttcttctttttgatcaatggaccagaaatcatgtcaaagctagcaggagaaagtgaaagcaacctcagaaaggcatttgaagaagctgagaaaaatgcaccttcaatcatttttattgatgagatagattccatagcacccaagagagaaaagacccatggagaagttgaaaggcgtattgtttcacagctcttgactcttatggatggcctcaagtctcgtgcacatgttattgttatgggtgccacaaaccgtccaaacagtatcgatcctgctcttagaaggtttggtcggtttgatcgtgagattgatatcggtgttccagatgaagttgggcgccttgaggttcttcggattcacacgaaaaacatgaagcttgctgaagatgttgacttggagatcattgcgaaggatactcatggttatgttggtgctgatcttgctgccctttgtactgaagctgctcttcaatgcattcgtgagaagatggatattatagatcttgaggatgagacaatagatgcggagatactgaactctatggctgtctcaaatgaccatttcaagactgcacttgggacaagcaacccatctgctctgcgtgaaactgttgttgaagtcccaaatgtctcttgggaagatattggtggtctggaaaatgttaagagggagctacaggagactgttcaatatccagtggagcatccagataaatttgaaaagtttggcatgtctccttcgaagggtgttttgttttatggccctcctggctgtggcaagactctgttggccaaggcaatcgctaatgaatgccaggctaacttcatcagtgtgaagggtcctgaactgctcaccatgtggtttggtgagagcgaggccaatgtccgtgagatttttgacaaggctaggcagtctgctccgtgtgtcctcttctttgatgagctcgactccattgctactcagagaggaagcagtgttggtgacgcgggcggtgctgctgacagggtgttgaaccagctgcttactgagatggatggcatgaatgccaagaagacggttttcattatcggcgcgactaacagaccagatatcattgaccctgccttgctgaggccaggacgcctcgatcagcttatctacattcctctgcccgatgagcagtccaggcttcagatcttcaaagcctgcctcaggaagtctcctgtggctaaggacgttgacttgcatgctcttgccaagtacacccagggtttcagcggagcagatatcaccgagatctgccagcgtgcgtgcaagtatgccatcagggagaacatcgagaaggacatcgagcgggagaggcgcaggaaggacaaccctgaggccatggaggaagacgaggtggacgacattgccgagatcatggctgcccacttcgaggagtccatgaagtacgcccgccgcagtgtcagtgatgccgacatccgcaagtaccaggccttcgcccagacactccagcagtcccgtgggtttggcagcgagttccggttctccgaccaaccgacggcagctgcaggctctgccggtgcggccgacccctttgcatccgctgcggctgcagccgacgatgacgacttatacagctaa

SEQ ID NO: 702 - protein, 810 aa, Zea mays
MASQGEPSSSDPKGKKDYSTAILERKKSPNRLVVDEATNDDNSVVALHPDTMERLQLFRGDTVLIKGKKRKDTICIVLADETCEEPKVRMNKIVRKNLRVRLSDVVSVHQCPDVKYGKRVHILPIDDTIEGITGNLFDAFLKPYFLEAYRPLRKGDLFLVRGGMRSVEFKVIETDPAEYCIVAPDTEIFCEGEPIKREDEERLDEVGYDDVGGVRKQMAQIRELVELPLRHPQLFKSIGVKPPKGILLFGPPGSGKTLIARAVANETGAFFFLINGPEIMSKLAGESESNLRKAFEEAEKNAPSIIFIDEIDSIAPKREKTHGEVERRIVSQLLTLMDGLKSRAHVIVMGATNRPNSIDPALRRFGRFDREIDIGVPDEVGRLEVLRIHTKNMKLAEDVDLEIIAKDTHGYVGADLAALCTEAALQCIREKMDIIDLEDETIDAEILNSMAVSNDHFKTALGTSNPSALRETVVEVPNVSWEDIGGLENVKRELQETVQYPVEHPDKFEKFGMSPSKGVLFYGPPGCGKTLLAKAIANECQANFISVKGPELLTMWFGESEANVREIFDKARQSAPCVLFFDELDSIATQRGSSVGDAGGAADRVLNQLLTEMDGMNAKKTVFIIGATNRPDIIDPALLRPGRLDQLIYIPLPDEQSRLQIFKACLRKSPVAKDVDLHALAKYTQGFSGADITEICQRACKYAIRENIEKDIERERRRKDNPEAMEEDEVDDIAEIMAAHFEESMKYARRSVSDADIRKYQAFAQTLQQSRGFGSEFRFSDQPTAAAGSAGAADPFASAAAAADDDDLYS

SEQ ID NO: 703 - DNA, 2430 bp, Zea mays
  CDS (1)..(2430)
atggcgagccaaggggagccctcggcctctgcttccgatccgaaggagaagaaggacttctcgacggcgatcctggagaggaaaaagtcaccgaaccgccttgtcgtcgacgaggccaccaacgacgataactccgtcgtcgctctgcaccctgacaccatggagaggctgcagctcttccgcggcgacaccgtgctcctcaagggtaagaagaggaaagacactatttgcattgtccttgcggacgaaacctgtgaggagccaaaggttcggatgaacaaggttgtccgccagaacctaagggtgaggcttggtgatgtggtttctgtccaccagtgccaggatgtgaaatatgggaagcgtgtccacattcttccaattgatgatacagttgaaggcattacagggaacctgtttgatgccttcttgaaaccatatttcctagaagcatacaggccgttgaggaaaggagaccttttccttgtcagaggaggaatgagaagtgtggaattcaaagtgatagagactgatcctgctgaatattgtatcgttgcgccagatactgaaatattttgtgatggggagcctattaagagagaggatgaggagcgtcttgatgaagttggttatgatgatgttggtggagttagaaagcaaatggcccaaatcagagagcttgttgagcttccactacgccatcctcagcttttcaaatctattggtgtgaagccaccaaagggcatattgctgtacgggccacctggttcgggaaagactcttattgctcgtgctgttgcaaatgagactggagcctttttcttcctgatcaatggtccagagattatgtcaaagctggcaggggagagtgaaagcaatctcagaaaggcatttgaagaagcagagaagaatgctccatctatcattttcattgatgaaattgattccattgcacccaagagagaaaagaccaatggagaagtagaacgtcgtattgtttcacagctactgactcttatggatggactcaaatctcgttcccatgttattgttatgggtgctacaaaccgaccaaacagcattgatcctgctcttcgaagatttggaaggtttgatcgggaaattgacattggagttcctgatgaagttggccggctcgaggttctccgcattcacactaagaacatgaaactagctgaagatgttaatttggaactcatttcaaaggatacccatggatatgttggtgctgatcttgctgccctttgcactgaagctgctcttcaatgcattcgtgagaagatggacatcatagatcttgaggatgagacaatagatgcagagatactgaactcgatggctgtcacaaatgaccatttcaagactgcacttggaacaagcaacccatctgctctccgtgaaactgttgttgaagtcccaaatgtctcttgggaagatattggtggcctggaaaatgttaagagggagctacaggagactgttcaatatccagtggagcatccagagaaatttgaaaagtttggcatgtctccttcaaagggtgttttgttttatggccctcctggctgtggcaagactttgttggccaaggcaattgccaatgaatgccaagctaacttcattagtgtgaagggtcctgaactgcttaccatgtggtttggtgagagtgaggccaatgtccgtgagatttttgacaaggctaggcagtctgctccatgtgtcctcttttttgatgagctcgactccattgctactcagagaggaagcagtgttggtgacgccggtggtgctgctgatagggtgttgaaccagctgcttactgagatggatggcatgaatgccaagaagacggtttttattatcggtgcaactaacagaccggacatcattgacccagccttgctgaggcctgggcgtcttgatcagcttatctatattcctctgcccgatgagcagtccaggcttcagatcttcaaagcctgtctcaggaagtctcctgtggccaaggatgttgacttgaatgctctcgccaaatacacccagggtttcagcggtgcagatatcacagagatctgccagcgcgcgtgcaagtatgccatcagggagaacatcgagaaggatatcgagagggagaggcgcagcaaagacaaccccgaggctatggaggaagacgaggtagacgacatcgctgagatcaaggctgctcacttcgaggagtccatgaagtacgcccgtcgcagcgtgagtgacgccgacatccgcaagtaccaggccttcgcccagacactccagcagtcccgcgggtttggcagcgagttccggttccccgaccaaccgacggcagctgctgctgcggccgatcccttcgcatccgctgcagcagcagctgacgatgatgacttatacagttaa

SEQ ID NO: 704 - protein, 809 aa, Zea mays
MASQGEPSASASDPKEKKDFSTAILERKKSPNRLVVDEATNDDNSVVALHPDTMERLQLFRGDTVLLKGKKRKDTICIVLADETCEEPKVRMNKVVRQNLRVRLGDVVSVHQCQDVKYGKRVHILPIDDTVEGITGNLFDAFLKPYFLEAYRPLRKGDLFLVRGGMRSVEFKVIETDPAEYCIVAPDTEIFCDGEPIKREDEERLDEVGYDDVGGVRKQMAQIRELVELPLRHPQLFKSIGVKPPKGILLYGPPGSGKTLIARAVANETGAFFFLINGPEIMSKLAGESESNLRKAFEEAEKNAPSIIFIDEIDSIAPKREKTNGEVERRIVSQLLTLMDGLKSRSHVIVMGATNRPNSIDPALRRFGRFDREIDIGVPDEVGRLEVLRIHTKNMKLAEDVNLELISKDTHGYVGADLAALCTEAALQCIREKMDIIDLEDETIDAEILNSMAVTNDHFKTALGTSNPSALRETVVEVPNVSWEDIGGLENVKRELQETVQYPVEHPEKFEKFGMSPSKGVLFYGPPGCGKTLLAKAIANECQANFISVKGPELLTMWFGESEANVREIFDKARQSAPCVLFFDELDSIATQRGSSVGDAGGAADRVLNQLLTEMDGMNAKKTVFIIGATNRPDIIDPALLRPGRLDQLIYIPLPDEQSRLQIFKACLRKSPVAKDVDLNALAKYTQGFSGADITEICQRACKYAIRENIEKDIERERRSKDNPEAMEEDEVDDIAEIKAAHFEESMKYARRSVSDADIRKYQAFAQTLQQSRGFGSEFRFPDQPTAAAAAADPFASAAAAADDDDLYS

SEQ ID NO: 705 - DNA, 2433 bp, Zea mays
  CDS (1)..(2433)
atggcgagccaaggcgagccgtcttcctccgatccgaaggggaagaaggattactctacggcgatcctggagaggaagaagtcgccgaaccggctggtggtcgacgaggccaccaatgatgacaactctgtcgtcgctctgcacccagacaccatggagaggctccagctcttccgcggtgacactgtcctgatcaagggtaagaagagaaaggacactgtctgcattgtgcttgcagatgagacatgtgaggagccaaaggttcggatgaacaagattgtcaggaagaacttgagggtacggcttggtgatgttgtatctgtccatcaatgcccagatgtcaaatacgggaagcgtgtgcacatacttccaattgatgacaccattgaaggcatcactggcaatttgtttgatgcctttctaaaaccatacttccttgaagcctatcgtcctttgaggaaaggagaccttttcctagtcaggggtggcatgagaagtgtagaattcaaagtcatagagactgatcctgcagagtattgtatcgttgcaccagatacagaaatattttgtgggggtgagcctattaagagggaggacgaggaaagactcgatgaggttggctatgacgatgttggtggagttagaaagcagatggcccaaatcagggaactggttgaacttccattgcgtcatccccagcttttcaagtctattggtgtgaaaccaccaaagggcatattgctgtttgggcctcctggctccggcaagacccttattgctagagctgtagctaatgagacaggtgctttcttctttttgatcaatggaccagaaatcatgtcaaagctagcaggagaaagtgaaagcaatctcagaaaggcatttgaagaagctgagaaaaatgcacctcccatcatttttattgatgagatagattccatagcacctaagagagagaagacccatggagaagttgaaaggcgtattgtttcacagctcttgactcttatggatgggctcaagtctcgtgcacatgtgattgttatgggtgccaccaaccgtccaaacagtatcgatcctgctcttagaaggtttggtaggtttgatcgcgagattgatattggtgttccagatgaagttggccgccttgaggttcttcggattcacacgaaaaacatgaagctggctgaagatgttgacttggagctcattgcgaaggatacccatgggtatgttggtgctgatcttgctgccctttgtactgaagctgctcttcaatgcattcgtgagaagatggatattatagaccttgaggatgagaccatagatgctgagatactgaactctatggctgtctcaaatgaccatttcaagaccgcacttggaacaagcaacccatctgctctgcgtgaaactgttgttgaagtcccaaatgtctcttgggaagatattggtggtctggaaaatgttaagagggagctacaggagactgttcaatatccagtggagcatccagataaatttgaaaagtttggcatgtctccttcgaagggcgttttgttttatggccctcctggctgtggcaagactctgttggccaaggcaattgctaacgaatgccaggctaacttcatcagtgtgaagggtcctgaactgctcaccatgtggtttggtgagagcgaggccaatgtccgtgagatttttgacaaggctaggcagtctgctccgtgtgtcctcttcttcgatgagctcgactccattgctactcagagaggaagcagtgttggtgacgcgggcggtgctgctgacagggtgttgaaccagctgcttactgagatggatggcatgaatgccaagaagacggttttcattatcggtgcgactaacagaccagatatcattgaccctgccttgctgaggccaggacgcctcgatcagcttatctacattcctctgcccgatgagcagtccaggcttcagatcttcaaagcctgcctcaggaagtctcctgtggctaaggacgttgacttgcatgctcttgccaagtacacccagggtttcagcggagcagatatcaccgagatctgccagcgtgcgtgcaagtatgccatcagggagaacatcgagaaggacatcgagcgggagaggcgcaggaaggacaaccctgaggccatggaggaagacgaggtggacgacattgccgagatcatggctgcccacttcgaggagtccatgaagtacgcccgccgcagtgtcagtgatgccgacatccgcaagtaccaggccttcgcccagacactccagcagtcccgtgggtttggcagcgagttccggttctccgaccaaccgacggcagctgcaggctctgccggtgcggccgacccctttgcatccgctgcggctgcagccgacgatgacgacttatacagctaa

SEQ ID NO: 706 - protein, 810 aa, Zea mays
MASQGEPSSSDPKGKKDYSTAILERKKSPNRLVVDEATNDDNSVVALHPDTMERLQLFRGDTVLIKGKKRKDTVCIVLADETCEEPKVRMNKIVRKNLRVRLGDVVSVHQCPDVKYGKRVHILPIDDTIEGITGNLFDAFLKPYFLEAYRPLRKGDLFLVRGGMRSVEFKVIETDPAEYCIVAPDTEIFCGGEPIKREDEERLDEVGYDDVGGVRKQMAQIRELVELPLRHPQLFKSIGVKPPKGILLFGPPGSGKTLIARAVANETGAFFFLINGPEIMSKLAGESESNLRKAFEEAEKNAPPIIFIDEIDSIAPKREKTHGEVERRIVSQLLTLMDGLKSRAHVIVMGATNRPNSIDPALRRFGRFDREIDIGVPDEVGRLEVLRIHTKNMKLAEDVDLELIAKDTHGYVGADLAALCTEAALQCIREKMDIIDLEDETIDAEILNSMAVSNDHFKTALGTSNPSALRETVVEVPNVSWEDIGGLENVKRELQETVQYPVEHPDKFEKFGMSPSKGVLFYGPPGCGKTLLAKAIANECQANFISVKGPELLTMWFGESEANVREIFDKARQSAPCVLFFDELDSIATQRGSSVGDAGGAADRVLNQLLTEMDGMNAKKTVFIIGATNRPDIIDPALLRPGRLDQLIYIPLPDEQSRLQIFKACLRKSPVAKDVDLHALAKYTQGFSGADITEICQRACKYAIRENIEKDIERERRRKDNPEAMEEDEVDDIAEIMAAHFEESMKYARRSVSDADIRKYQAFAQTLQQSRGFGSEFRFSDQPTAAAGSAGAADPFASAAAAADDDDLYS

SEQ ID NO: 707 - DNA, 2433 bp, Zea mays
  CDS (1)..(2433)
atggcgagccaaggggagccctcggcctctgcttccgatccgaaggagaagaaggacttctcgacggcgatcctggagaggaaaaagtcaccgaaccgccttgtcgtcgacgaggccaccaacgacgataactccgtcgtcgctctgcaccctgacaccatggagaggctgcagctcttccgcggcgacaccgtgctcctcaagggtaagaagaggaaagacactatttgcattgtccttgcggacgaaacctgtgaggagccaaaggttcggatgaacaaggttgtccgccagaacctaagggtgaggcttggtgatgtggtttctgtccaccagtgccaggatgtgaaatatgggaagcgtgtccacattcttccaattgatgatacagttgaaggcattacagggaacctgtttgatgccttcttgaaaccatatttcctagaagcatacaggccgttgaggaaaggagaccttttccttgtcagaggaggaatgagaagtgtggaattcaaagtgatagagactgatcctgctgaatattgtatcgttgcgccagatactgaaatattttgtgatggggagcctattaagagagaggatgaggagcgtcttgatgaagttggttatgatgatgttggtggagttagaaagcaaatggcccaaatcagagagcttgttgagcttccactacgccatcctcaacttttcaaatctattggtgtgaagccaccaaagggcatattgctgtacgggccacctggttccggaaagactcttattgctcgtgctgttgcaaatgagactggagcctttttcttcctgatcaatggtccagagattatgtcaaagctggcaggggagagtgaaagcaatctcagaaaggcatttgaagaagcagagaagaatgctccatctatcattttcattgatgaaattgattccattgcacccaagagagaaaagaccaatggagaagtagaacgtcgtattgtttcacagctactgactcttatggatggactcaaatctcgttcccatgttattgttatgggtgctacaaaccgaccaaacagcattgatcctgctcttcgaagatttggaaggtttgatcgggaaattgacattggagttcctgatgaagttggccggctcgaggttctccgcattcacactaagaacatgaaactagctgaagatgttaatttggaactcatttcaaaagatacccatggatacgttggtgctgatcttgctgccctttgcactgaggctgctcttcagtgcattcgtgagaagatggacatcatagatcttgaggatgagacaatcgatgcagagatattgaactcaatggctgttacaaatgaccatttcaagactgcgcttggaacaagcaacccatctgctcttcgtgaaactgttgtcgaagtcccaaatgtctcttgggaggatattggtgggctggagaatgtcaagagggagctccaggagactgttcaatatcctgtggagcatccggagaagttcgagaagtttggcatgtctccatccaaaggagttctgttctatggtcctcctggttgtggtaaaaccttgttggcaaaggcaattgccaacgagtgccaggctaacttcatcagtgtcaagggtcctgaattgcttaccatgtggtttggtgagagtgaagccaacgtccgcgaaatttttgataaggctcgccaatctgctccttgtgtcctcttctttgatgagcttgactcaattgcaactcagagaggaagtagtgtgggtgatgctggaggcgcggctgatagagtgcttaatcagctactgaccgagatggatggcatgaacgccaagaaaactgtgtttattattggtgctacaaacaggcctgacatcattgatcctgctcttctgaggccagggcgtcttgaccagctgatctacattccactgcctgatgagcagtctaggctccagatcttcaaggcctgcctaaggaagtcccctgtggcaaaggatgtggacctgaatgctcttgctaagtacacacaagggttcagtggagcagatatcacagaaatttgccagcgtgcgtgcaaatatgcaatcagagagaacattgagaaggacattgagagggaaaggcggatgaaggacaaccctgaggcgatggaggaagatgaagtggacgagattgccgagatcaaagcagctcacttcgaggagtctatgaagtatgctcggcgcagtgtcagtgatgctgatatccgcaagtaccaggcgttcgcccagacgttgcagcagtcccgtgggttcggcagcgagttccgcttctcagagcaatcggcgacagctagtgctgctgcagccgatccgtttgcttcggccggtgccgcggctgacgatgacgatctatacagctag

SEQ ID NO: 708 - protein, 810 aa, Zea mays
MASQGEPSASASDPKEKKDFSTAILERKKSPNRLVVDEATNDDNSVVALHPDTMERLQLFRGDTVLLKGKKRKDTICIVLADETCEEPKVRMNKVVRQNLRVRLGDVVSVHQCQDVKYGKRVHILPIDDTVEGITGNLFDAFLKPYFLEAYRPLRKGDLFLVRGGMRSVEFKVIETDPAEYCIVAPDTEIFCDGEPIKREDEERLDEVGYDDVGGVRKQMAQIRELVELPLRHPQLFKSIGVKPPKGILLYGPPGSGKTLIARAVANETGAFFFLINGPEIMSKLAGESESNLRKAFEEAEKNAPSIIFIDEIDSIAPKREKTNGEVERRIVSQLLTLMDGLKSRSHVIVMGATNRPNSIDPALRRFGRFDREIDIGVPDEVGRLEVLRIHTKNMKLAEDVNLELISKDTHGYVGADLAALCTEAALQCIREKMDIIDLEDETIDAEILNSMAVTNDHFKTALGTSNPSALRETVVEVPNVSWEDIGGLENVKRELQETVQYPVEHPEKFEKFGMSPSKGVLFYGPPGCGKTLLAKAIANECQANFISVKGPELLTMWFGESEANVREIFDKARQSAPCVLFFDELDSIATQRGSSVGDAGGAADRVLNQLLTEMDGMNAKKTVFIIGATNRPDIIDPALLRPGRLDQLIYIPLPDEQSRLQIFKACLRKSPVAKDVDLNALAKYTQGFSGADITEICQRACKYAIRENIEKDIERERRMKDNPEAMEEDEVDEIAEIKAAHFEESMKYARRSVSDADIRKYQAFAQTLQQSRGFGSEFRFSEQSATASAAAADPFASAGAAADDDDLYS

SEQ ID NO: 709 - DNA, 2433 bp, Zea mays
  CDS (1)..(2433)
atggcgagccaaggcgagccgtcttcctccgatccgaaggggaagaaggattactctacggcgatcctggagaggaagaagtcgccgaaccggctggtggtcgacgaggccaccaatgatgacaactctgtcgtcgctctgcacccagacaccatggagaggctccagctcttccgcggtgacactgtcctgatcaagggtaagaagagaaaggacactgtctgcattgtgcttgcagatgagacatgtgaggagccaaaggttcggatgaacaagattgtcaggaagaacttgagggtacggcttggtgatgttgtatctgtccatcaatgcccagatgtcaaatacgggaagcgtgtgcacatacttccaattgatgacaccattgaaggcatcactggcaatttgtttgatgcctttctaaaaccatacttccttgaagcctatcgtcctttgaggaaaggagaccttttcctagtcaggggtggcatgagaagtgtagaattcaaagtcatagagactgatcctgcagagtattgtatcgttgcaccagatacagaaatattttgtgggggtgagcctattaagagggaggacgaggaaagactcgatgaggttggctatgacgatgttggtggagttagaaagcagatggcccaaatcagggaactggttgaacttccattgcgtcatccccagcttttcaagtctattggtgtgaaaccaccaaagggcatattgctgtttgggcctcctggctccggcaagacccttattgctagagctgtagctaatgagacaggtgctttcttctttttgatcaatggaccagaaatcatgtcaaagctagcaggagaaagtgaaagcaatctcagaaaggcatttgaagaagctgagaaaaatgcaccttccatcatttttattgatgagatagattccatagcacctaagagagagaagacccatggagaagttgaaaggcgtattgtttcacagctcttgactcttatggatgggctcaagtctcgtgcacatgtgattgttatgggtgccaccaaccgtccaaacagtatcgatcctgctcttagaaggtttggtaggtttgatcgcgagattgatattggtgttccagatgaagttggccgccttgaggttcttcggattcacacgaaaaacatgaagctggctgaagatgttgacttggagctcattgcgaaggatacccatgggtatgttggtgctgatcttgctgccctttgtactgaagctgctcttcaatgcattcgtgagaagatggatattatagaccttgaggatgagaccatagatgctgagatactgaactctatggctgtctcaaatgaccatttcaagaccgcacttggaacaagcaacccatctgctctgcgtgaaactgttgttgaagtcccaaatgtctcttgggaagatattggtggtctggaaaatgttaagagggagctacaggagactgttcaatatccagtggagcatccagataaatttgaaaagtttggcatgtctccttcgaagggcgttttgttttatggccctcctggctgtggcaagactctgttggccaaggcaattgctaacgaatgccaggctaacttcatcagtgtgaagggtcctgaactgctcaccatgtggtttggtgagagcgaggccaatgtccgtgagatttttgacaaggctaggcagtctgctccgtgtgtcctcttcttcgatgagctcgactccattgctactcagagaggaagcagtgttggtgacgcgggcggtgctgctgacagggtgttgaaccagctgcttactgagatggatggcatgaatgccaagaagacggttttcattatcggtgcgactaacagaccagatatcattgaccctgccttgctgaggccaggacgcctcgatcagcttatctacattcctctgcccgatgagcagtccaggcttcagatcttcaaagcctgcctcaggaagtctcctgtggctaaggacgttgacttgcatgctcttgccaagtacacccagggtttcagcggagcagatatcaccgagatctgccagcgtgcgtgcaagtatgccatcagggagaacatcgagaaggacatcgagcgggagaggcgcaggaaggacaacccagaggccatggaggaagacgaggtggacgacattgccgagatcatggctgcccacttcgaggagtccatgaagtacgcccgccgcagtgtcagtgatgccgacatccgcaagtaccaggccttcgcccagacactccagcagtcccgtgggtttggcagcgagttccggttctccgaccaaccgacggcagctgcaggctctgccggtgcggccgacccctttgcatccgctgcggctgcagccgacgatgacgacttatacagctaa

SEQ ID NO: 710 - protein, 810 aa, Zea mays
MASQGEPSSSDPKGKKDYSTAILERKKSPNRLVVDEATNDDNSVVALHPDTMERLQLFRGDTVLIKGKKRKDTVCIVLADETCEEPKVRMNKIVRKNLRVRLGDVVSVHQCPDVKYGKRVHILPIDDTIEGITGNLFDAFLKPYFLEAYRPLRKGDLFLVRGGMRSVEFKVIETDPAEYCIVAPDTEIFCGGEPIKREDEERLDEVGYDDVGGVRKQMAQIRELVELPLRHPQLFKSIGVKPPKGILLFGPPGSGKTLIARAVANETGAFFFLINGPEIMSKLAGESESNLRKAFEEAEKNAPSIIFIDEIDSIAPKREKTHGEVERRIVSQLLTLMDGLKSRAHVIVMGATNRPNSIDPALRRFGRFDREIDIGVPDEVGRLEVLRIHTKNMKLAEDVDLELIAKDTHGYVGADLAALCTEAALQCIREKMDIIDLEDETIDAEILNSMAVSNDHFKTALGTSNPSALRETVVEVPNVSWEDIGGLENVKRELQETVQYPVEHPDKFEKFGMSPSKGVLFYGPPGCGKTLLAKAIANECQANFISVKGPELLTMWFGESEANVREIFDKARQSAPCVLFFDELDSIATQRGSSVGDAGGAADRVLNQLLTEMDGMNAKKTVFIIGATNRPDIIDPALLRPGRLDQLIYIPLPDEQSRLQIFKACLRKSPVAKDVDLHALAKYTQGFSGADITEICQRACKYAIRENIEKDIERERRRKDNPEAMEEDEVDDIAEIMAAHFEESMKYARRSVSDADIRKYQAFAQTLQQSRGFGSEFRFSDQPTAAAGSAGAADPFASAAAAADDDDLYS

SEQ ID NO: 711 - DNA, 2442 bp, Triticum aestivum
  CDS (1)..(2442)
atggccgccccgacgccgcagggcgaggcctcctcctccgatcccaagtcgaagaaggactactcgacggcgattctagagcggaagaagtcccctaaccgcctcgtcgtcgacgaggccaccaacgatgacaactccgtcgtcgccctccaccccgacaccatggagaagctccagctcttccgcggcgacacggtccttcttaagggtaagaaaaggaaggacacaatctgcattgtgcttgcagatgacacttgtgaggagccaaagatcagaatgaacaagaccgtcaggaagaacttgagagtgcgacttggtgacgtggtgtctgttcaccaatgccctgatgtcaaatacgggaagcgggtgcacacacttcctattgatgacacagttgaaggcattactggaaacttgtttgacgcgttcttgaaaccatacttccttgaagcttaccgtcctttgagaaagggagaccttttccttgtgaggggtggaatgagaagtgtggagttcaaagttatagagactgacccggcagagtattgcattgttgcaccagacactgagatcttctgtgatggtgagcctgttaagagggaggatgaggagaggcttgacgatgttggctacgatgatgttggtggagtcaggaagcaaatggcccagatcagagaactggttgaactcccactgcgtcaccctcaacttttcaagtctatcggtgtgaagcctccaaagggcatattgctgtttggaccacctggctctggcaagacccttattgcgagggctgttgccaatgagacgggtgcattcttctttctgatcaatggcccagaaattatgtccaagttagcaggagaaagtgagagcaatctcaggaaggcatttgaagaagcagagaagaatgcaccatcaatcatcttcattgatgagattgattcaatagccccaaagagagagaagaccaatggagaagttgaaaggcgtattgtgtctcagctgttgacccttatggatgggcttaagtcccgtgcgcatgttattgttatgggtgctacaaaccgcccaaacagtattgatcctgctctcagaagatttggtaggtttgaccgtgagattgacattggagtccctgatgaagttgggcgccttgaggttctcaggattcacaccaaaaacatgaagttggctgaagatgtggaactggaacatatttcaagagatactcatgggtatgttggtgctgatcttgctgctctttgcaccgaggctgctctccaatgcattcgtgagaagatggatattattgatcttgaggacgagacaatagatgctgagatactcaactctatggctgtgacaaatgaccatttcaagaccgccctgacgacaagcaacccgtctgctctccgtgaaactgttgttgaagttcccaatgtttcttgggaagatattggtgggctggagaatgtcaaaagggagttgcaggagactgttcaataccctgtggagcatccggagaaatttgagaagtttggcatgtctccttccaagggtgttttgttctatggccctcctggctgtggtaaaaccttattggccaaggcaattgcaaatgagtgccaggctaacttcatcagtatcaagggacctgagctgcttaccatgtggtttggtgagagtgaggccaatgtgcgtgagattttcgacaaggctagggggtcagcaccatgtgtgctcttctttgatgagcttgactctattgctacccagagaggaagcagcagtggggatgctggaggtgctgctgatagagtgctgaaccagctgctgactgagatggatggcatgaatgctaagaaaaccgtcttcatcattggtgctaccaacaggccagacattatagaccctgccctccttaggccagggcgtcttgatcagcttatctacatccctcttcctgatgtcgagtcgaggcaccagatcttcaaagcttgcctcagaaagtctcctttggccaaggatattgatctgagtgctcttgccaagtacactcaagggttcagcggtgctgatatcactgaaatttgccagcgtgcttgcaagtatgccatcagggagaacatcgagaaggacatcgagagggagaggcggaggaaggacaaccctgaagccatggaggaggacgagggtgatgaggttgctgagatcagggctgcccactttgaggagtcgatgaagtatgctcgccggagcgtgagcgacgctgacatccgcaagtaccaggcctttgctcagactctgcagcagtctcgtggattcggcagcgagttccggttccctgatcagccggctgcgggcgcttcctctgccactgcggccgacccttttgcttccgctgctgcagcagccgacgatgatgatttatatagctaa

SEQ ID NO: 712 - protein, 813 aa, Triticum aestivum
MAAPTPQGEASSSDPKSKKDYSTAILERKKSPNRLVVDEATNDDNSVVALHPDTMEKLQLFRGDTVLLKGKKRKDTICIVLADDTCEEPKIRMNKTVRKNLRVRLGDVVSVHQCPDVKYGKRVHTLPIDDTVEGITGNLFDAFLKPYFLEAYRPLRKGDLFLVRGGMRSVEFKVIETDPAEYCIVAPDTEIFCDGEPVKREDEERLDDVGYDDVGGVRKQMAQIRELVELPLRHPQLFKSIGVKPPKGILLFGPPGSGKTLIARAVANETGAFFFLINGPEIMSKLAGESESNLRKAFEEAEKNAPSIIFIDEIDSIAPKREKTNGEVERRIVSQLLTLMDGLKSRAHVIVMGATNRPNSIDPALRRFGRFDREIDIGVPDEVGRLEVLRIHTKNMKLAEDVELEHISRDTHGYVGADLAALCTEAALQCIREKMDIIDLEDETIDAEILNSMAVTNDHFKTALTTSNPSALRETVVEVPNVSWEDIGGLENVKRELQETVQYPVEHPEKFEKFGMSPSKGVLFYGPPGCGKTLLAKAIANECQANFISIKGPELLTMWFGESEANVREIFDKARGSAPCVLFFDELDSIATQRGSSSGDAGGAADRVLNQLLTEMDGMNAKKTVFIIGATNRPDIIDPALLRPGRLDQLIYIPLPDVESRHQIFKACLRKSPLAKDIDLSALAKYTQGFSGADITEICQRACKYAIRENIEKDIERERRRKDNPEAMEEDEGDEVAEIRAAHFEESMKYARRSVSDADIRKYQAFAQTLQQSRGFGSEFRFPDQPAAGASSATAADPFASAAAAADDDDLYS

SEQ ID NO: 713 - DNA, 26 bp, Artificial sequence
  primer
atagagctcatggcgagcggaagctg

SEQ ID NO: 714 - DNA, 30 bp, Artificial sequence
  primer
atacccggggaaacagcgtgagaagaagcc

SEQ ID NO: 715 - DNA, 22 bp, Artificial sequence
  primer
atgttggaaaccgaaagcagtg

SEQ ID NO: 716 - DNA, 21 bp, Artificial sequence
  primer
tcatgtagcagaagctactag

SEQ ID NO: 717 - DNA, 26 bp, Artificial sequence
  primer
ataccatggatggcgagcggaagctg

SEQ ID NO: 718 - DNA, 32 bp, Artificial sequence
  primer
atattaattaagaaacagcgtgagaagaagcc

SEQ ID NO: 719 - DNA, 26 bp, Artificial sequence
  primer
ataggtaccatggcgagcggaagctg

SEQ ID NO: 720 - DNA, 30 bp, Artificial sequence
  primer
atagtcgacgaaacagcgtgagaagaagcc

SEQ ID NO: 721 - protein, 831 aa, Artificial sequence
  consensus sequence
  Variant (4)..(4): Xaa in position 4 is any amino acid
  Variant (6)..(6): Xaa in position 6 is any amino acid
  Variant (13)..(13): Xaa in position 13 is any amino acid
  Variant (15)..(15): Xaa in position 15 is any amino acid
  Variant (24)..(25): Xaa in position 24 to 25 is any amino acid
  Variant (27)..(27): Xaa in position 27 is any amino acid
  Variant (29)..(29): Xaa in position 29 is any amino acid
  Variant (31)..(38): Xaa in position 31 to 38 is any amino acid
  Variant (40)..(40): Xaa in position 40 is any amino acid
  Variant (42)..(43): Xaa in position 42 to 43 is any amino acid
  Variant (46)..(46): Xaa in position 46 is any amino acid
  Variant (51)..(51): Xaa in position 51 is any amino acid
  Variant (55)..(57): Xaa in position 55 to 57 is any amino acid
  Variant (59)..(60): Xaa in position 59 to 60 is any amino acid
  Variant (62)..(62): Xaa in position 62 is any amino acid
  Variant (64)..(64): Xaa in position 64 is any amino acid
  Variant (67)..(68): Xaa in position 67 to 68 is any amino acid
  Variant (70)..(72): Xaa in position 70 to 72 is any amino acid
  Variant (75)..(76): Xaa in position 75 to 76 is any amino acid
  Variant (79)..(79): Xaa in position 79 is any amino acid
  Variant (82)..(83): Xaa in position 82 to 83 is any amino acid
  Variant (85)..(85): Xaa in position 85 is any amino acid
  Variant (89)..(90): Xaa in position 89 to 90 is any amino acid
  Variant (92)..(92): Xaa in position 92 is any amino acid
  Variant (96)..(96): Xaa in position 96 is any amino acid
  Variant (102)..(104): Xaa in position 102 to 104 is any amino acid
  Variant (107)..(107): Xaa in position 107 is any amino acid
  Variant (109)..(109): Xaa in position 109 is any amino acid
  Variant (113)..(113): Xaa in position 113 is any amino acid
  Variant (116)..(116): Xaa in position 116 is any amino acid
  Variant (122)..(125): Xaa in position 122 to 125 is any amino acid
  Variant (127)..(127): Xaa in position 127 is any amino acid
  Variant (128)..(128): Xaa in position 128 is any or no amino acid
  Variant (131)..(132): Xaa in position 131 to 132 is any amino acid
  Variant (135)..(135): Xaa in position 135 is any amino acid
  Variant (138)..(138): Xaa in position 138 is any amino acid
  Variant (140)..(140): Xaa in position 140 is any amino acid
  Variant (142)..(142): Xaa in position 142 is any amino acid
  Variant (143)..(143): Xaa in position 143 is any or no amino acid
  Variant (147)..(148): Xaa in position 147 to 148 is any amino acid
  Variant (154)..(154): Xaa in position 154 is any amino acid
  Variant (155)..(155): Xaa in position 155 is any or no amino acid
  Variant (157)..(158): Xaa in position 157 to 158 is any amino acid
  Variant (164)..(164): Xaa in position 164 is any amino acid
  Variant (167)..(167): Xaa in position 167 is any amino acid
  Variant (190)..(190): Xaa in position 190 is any amino acid
  Variant (193)..(193): Xaa in position 193 is any amino acid
  Variant (197)..(197): Xaa in position 197 is any amino acid
  Variant (202)..(202): Xaa in position 202 is any amino acid
  Variant (207)..(207): Xaa in position 207 is any amino acid
  Variant (212)..(212): Xaa in position 212 is any amino acid
  Variant (226)..(226): Xaa in position 226 is any amino acid
  Variant (236)..(236): Xaa in position 236 is any amino acid
  Variant (256)..(259): Xaa in position 256 to 259 is any amino acid
  Variant (261)..(261): Xaa in position 261 is any amino acid
  Variant (279)..(279): Xaa in position 279 is any amino acid
  Variant (297)..(297): Xaa in position 297 is any amino acid
  Variant (299)..(299): Xaa in position 299 is any amino acid
  Variant (301)..(302): Xaa in position 301 to 302 is any amino acid
  Variant (303)..(305): Xaa in position 303 to 305 is any or no amino acid
  Variant (307)..(307): Xaa in position 307 is any amino acid
  Variant (309)..(310): Xaa in position 309 to 310 is any amino acid
  Variant (332)..(332): Xaa in position 332 is any amino acid
  Variant (339)..(340): Xaa in position 339 to 340 is any amino acid
  Variant (345)..(345): Xaa in position 345 is any amino acid
  Variant (347)..(347): Xaa in position 347 is any amino acid
  Variant (356)..(357): Xaa in position 356 to 357 is any amino acid
  Variant (363)..(367): Xaa in position 363 to 367 is any amino acid
  Variant (381)..(381): Xaa in position 381 is any amino acid
  Variant (385)..(385): Xaa in position 385 is any amino acid
  Variant (387)..(387): Xaa in position 387 is any amino acid
  Variant (394)..(394): Xaa in position 394 is any amino acid
  Variant (398)..(399): Xaa in position 398 to 399 is any amino acid
  Variant (400)..(401): Xaa in position 400 to 401 is any or no amino acid
  Variant (406)..(406): Xaa in position 406 is any amino acid
  Variant (410)..(411): Xaa in position 410 to 411 is any amino acid
  Variant (413)..(416): Xaa in position 413 to 416 is any amino acid
  Variant (418)..(419): Xaa in position 418 to 419 is any amino acid
  Variant (422)..(423): Xaa in position 422 to 423 is any amino acid
  Variant (432)..(432): Xaa in position 432 is any amino acid
  Variant (433)..(433): Xaa in position 433 is any or no amino acid
  Variant (443)..(443): Xaa in position 443 is any amino acid
  Variant (449)..(450): Xaa in position 449 to 450 is any amino acid
  Variant (458)..(458): Xaa in position 458 is any amino acid
  Variant (459)..(467): Xaa in position 459 to 467 is any or no amino acid
  Variant (473)..(473): Xaa in position 473 is any amino acid
  Variant (476)..(477): Xaa in position 476 to 477 is any amino acid
  Variant (479)..(479): Xaa in position 479 is any amino acid
  Variant (483)..(483): Xaa in position 483 is any amino acid
  Variant (487)..(487): Xaa in position 487 is any amino acid
  Variant (501)..(501): Xaa in position 501 is any amino acid
  Variant (506)..(506): Xaa in position 506 is any amino acid
  Variant (517)..(517): Xaa in position 517 is any amino acid
  Variant (524)..(524): Xaa in position 524 is any amino acid
  Variant (534)..(534): Xaa in position 534 is any amino acid
  Variant (536)..(536): Xaa in position 536 is any amino acid
  Variant (543)..(544): Xaa in position 543 to 544 is any amino acid
  Variant (549)..(549): Xaa in position 549 is any amino acid
  Variant (559)..(560): Xaa in position 559 to 560 is any amino acid
  Variant (563)..(563): Xaa in position 563 is any amino acid
  Variant (564)..(564): Xaa in position 564 is any or no amino acid
  Variant (566)..(566): Xaa in position 566 is any amino acid
  Variant (572)..(573): Xaa in position 572 to 573 is any amino acid
  Variant (575)..(575): Xaa in position 575 is any amino acid
  Variant (590)..(591): Xaa in position 590 to 591 is any amino acid
  Variant (594)..(594): Xaa in position 594 is any amino acid
  Variant (597)..(597): Xaa in position 597 is any amino acid
  Variant (605)..(606): Xaa in position 605 to 606 is any amino acid
  Variant (609)..(609): Xaa in position 609 is any amino acid
  Variant (619)..(619): Xaa in position 619 is any amino acid
  Variant (621)..(621): Xaa in position 621 is any amino acid
  Variant (623)..(623): Xaa in position 623 is any amino acid
  Variant (628)..(630): Xaa in position 628 to 630 is any amino acid
  Variant (632)..(633): Xaa in position 632 to 633 is any amino acid
  Variant (635)..(636): Xaa in position 635 to 636 is any amino acid
  Variant (638)..(638): Xaa in position 638 is any amino acid
  Variant (642)..(642): Xaa in position 642 is any amino acid
  Variant (644)..(646): Xaa in position 644 to 646 is any amino acid
  Variant (651)..(653): Xaa in position 651 to 653 is any amino acid
  Variant (655)..(656): Xaa in position 655 to 656 is any amino acid
  Variant (658)..(658): Xaa in position 658 is any amino acid
  Variant (665)..(667): Xaa in position 665 to 667 is any amino acid
  Variant (673)..(673): Xaa in position 673 is any amino acid
  Variant (675)..(675): Xaa in position 675 is any amino acid
  Variant (679)..(682): Xaa in position 679 to 682 is any amino acid
  Variant (683)..(696): Xaa in position 683 to 696 is any or no amino acid
  Variant (698)..(701): Xaa in position 698 to 701 is any amino acid
  Variant (702)..(706): Xaa in position 702 to 706 is any or no amino acid
  Variant (708)..(713): Xaa in position 708 to 713 is any amino acid
  Variant (714)..(729): Xaa in position 714 to 729 is any or no amino acid
  Variant (732)..(732): Xaa in position 732 is any amino acid
  Variant (734)..(734): Xaa in position 734 is any amino acid
  Variant (737)..(737): Xaa in position 737 is any amino acid
  Variant (745)..(747): Xaa in position 745 to 747 is any amino acid
  Variant (749)..(749): Xaa in position 749 is any amino acid
  Variant (751)..(751): Xaa in position 751 is any amino acid
  Variant (754)..(754): Xaa in position 754 is any amino acid
  Variant (756)..(759): Xaa in position 756 to 759 is any amino acid
  Variant (761)..(761): Xaa in position 761 is any amino acid
  Variant (763)..(763): Xaa in position 763 is any amino acid
  Variant (764)..(766): Xaa in position 764 to 766 is any or no amino acid
  Variant (768)..(768): Xaa in position 768 is any amino acid
  Variant (770)..(772): Xaa in position 770 to 772 is any amino acid
  Variant (773)..(824): Xaa in position 773 to 824 is any or no amino acid
  Variant (827)..(829): Xaa in position 827 to 829 is any amino acid
TMEXLXLFRGDTXLXKGKKRKDTXXIXLXDXXXXXXXXRXNXXVRXNLRVXLGDXXXVXXCXDXKYXXRXXXLPXXDTXEGXXGXLFDXXLXPYFXEAYRPXXXGDXFXVRGXMRXVEFKVXXXXPXXEYXXVAXDTXIXCXXGEPXXREDEEXXLXXVGYDDXGGXRKQMAQIRELVELPLRHPQLFKXIGXKPPXGILLXGPPGXGKTLXARAVANETGAFFFXINGPEIMSKXAGESESNLRKAFEEAEKNAXXXXPXIIFIDEIDSIAPKREKTXGEVERRIVSQLLTLMDGXKXRXXXXXVXVXXATNRPNSIDPALRRFGRFDREXDIGVPDXXGRLEXLXIHTKNMKLXXDVDLEXXXXXTHGYVGADLAALCXEAAXQXIREKMDXIDLXXXXIDAEXLNSXXVXXXXFXXALXXSNPSALREXXVVEVPNVSWXDIGGLXXVKRELQEXXXXXXXXXXVQYPVXHPXXFXKFGXSPSXGVLFYGPPGCGKTXLAKAXANECQANFISXKGPELLXMWFGESEANXRXIFDKARXXAPCVXFFDELDSIAXXRGXXSXGDAGGXXAXDRVLNQLLTEMDGMXXKKXVFXIGATNRPXXIDXALLRPGRLDXLXYXPLPDXXXRXXIXXAXLRKXPXXXDVDLXXXAXXTXGFSGADXXXICQRAXKXAIRXXXXXXXXXXXXXXXXXXEXXXXXXXXXMXXXXXXXXXXXXXXXXXXXXXXHFXEXMKXARRSVSDXXXRXYXAFXQXXXXSXGXXXXFXFXXXXXXXXXXXXXXXXXXXXXXXXXXXXXXXXXXXXXXXXXXXXXXXXXXXXXXXDDXXXLY

SEQ ID NO: 722 - protein, 76 aa, Artificial sequence
  protein pattern
  Variant (3)..(5): Xaa in position 3 to 5 is any or no amino acid
  Variant (7)..(7): Xaa in position 7 is Phe, Leu or Val
  Variant (8)..(8): Xaa in position 8 is any amino acid
  Variant (9)..(9): Xaa in position 9 is His or Tyr
  Variant (10)..(10): Xaa in position 10 is Ala or Pro
  Variant (11)..(14): Xaa in position 11 to 14 is any amino acid
  Variant (15)..(15): Xaa in position 15 is Ala, Ser, Thr or Val
  Variant (16)..(16): Xaa in position 16 is Ile or Leu
  Variant (18)..(18): Xaa in position 18 is Ile, Leu or Val
  Variant (19)..(20): Xaa in position 19 to 20 is any amino acid
  Variant (22)..(22): Xaa in position 22 is Lys or Arg
  Variant (24)..(24): Xaa in position 24 is Ile, Leu or Val
  Variant (26)..(26): Xaa in position 26 is Leu or Met
  Variant (27)..(27): Xaa in position 27 is Phe, His or Tyr
  Variant (30)..(30): Xaa in position 30 is Pro or Ser
  Variant (32)..(32): Xaa in position 32 is Ser or Thr
  Variant (35)..(36): Xaa in position 35 to 36 is any amino acid
  Variant (37)..(37): Xaa in position 37 is Ile, Leu or Met
  Variant (38)..(38): Xaa in position 38 is Ala or Val
  Variant (41)..(41): Xaa in position 41 is Ile or Val
  Variant (42)..(42): Xaa in position 42 is Ala or Val
  Variant (43)..(43): Xaa in position 43 is any amino acid
  Variant (45)..(45): Xaa in position 45 is Cys, Ser or Thr
  Variant (46)..(46): Xaa in position 46 is Asp, Gly or Asn
  Variant (48)..(48): Xaa in position 48 is Phe or His
  Variant (49)..(49): Xaa in position 49 is Phe or Leu
  Variant (50)..(51): Xaa in position 50 to 51 is any amino acid
  Variant (52)..(52): Xaa in position 52 is Ile, Leu or Val
  Variant (53)..(53): Xaa in position 53 is Asp, Asn or Ser
  Variant (54)..(54): Xaa in position 54 is Gly, Pro or Ser
  Variant (55)..(55): Xaa in position 55 is any amino acid
  Variant (56)..(56): Xaa in position 56 is Glu or Ser
  Variant (57)..(57): Xaa in position 57 is Ile or Val
  Variant (58)..(61): Xaa in position 58 to 61 is any amino acid
  Variant (62)..(62): Xaa in position 62 is Ala or Pro
  Variant (65)..(65): Xaa in position 65 is Gly or Ser
  Variant (67)..(68): Xaa in position 67 to 68 is any amino acid
  Variant (69)..(69): Xaa in position 69 is Leu or Met
  Variant (71)..(71): Xaa in position 71 is any amino acid
  Variant (72)..(72): Xaa in position 72 is Ala or Val
  Variant (74)..(74): Xaa in position 74 is Ala, Glu or Thr
ELXXXPXXXXXXXXXXGXXXPXGXLXXGPXGXGKXXXXRAXXXEXXAXXXXXXXXXXXXXXXGEXEXXXRXXFXEA

SEQ ID NO: 723 - protein, 37 aa, Artificial sequence
  protein pattern
  Variant (2)..(2): Xaa in position 2 is any amino acid
  Variant (3)..(3): Xaa in position 3 is any or no amino acid
  Variant (5)..(5): Xaa in position 5 is any or no amino acid
  Variant (7)..(7): Xaa in position 7 is Ile or Met
  Variant (10)..(10): Xaa in position 10 is Ile or Leu
  Variant (12)..(12): Xaa in position 12 is Asp, Ser or Val
  Variant (13)..(13): Xaa in position 13 is Ile or Leu
  Variant (14)..(14): Xaa in position 14 is Ala or Cys
  Variant (16)..(16): Xaa in position 16 is any amino acid
  Variant (18)..(21): Xaa in position 18 to 21 is any amino acid
  Variant (22)..(22): Xaa in position 22 is any or no amino acid
  Variant (24)..(24): Xaa in position 24 is any amino acid
  Variant (25)..(25): Xaa in position 25 is Asp, Glu or Gly
  Variant (26)..(26): Xaa in position 26 is any amino acid
  Variant (28)..(28): Xaa in position 28 is Ile or Val
  Variant (29)..(29): Xaa in position 29 is Ala or Val
  Variant (30)..(30): Xaa in position 30 is Gly or Ser
  Variant (33)..(33): Xaa in position 33 is Phe or Leu
PXXIXFXDEXDXXXPXRXXXXXEXXXRXXXQLXTLMD

SEQ ID NO: 724 - protein, 9 aa, Artificial sequence
  protein pattern
  Variant (5)..(5): Xaa in position 5 is any amino acid
ALRRXGRFD

SEQ ID NO: 725 - protein, 20 aa, Artificial sequence
  protein pattern
  Variant (2)..(2): Xaa in position 2 is any amino acid
  Variant (3)..(3): Xaa in position 3 is Pro or Val
  Variant (4)..(4): Xaa in position 4 is any amino acid
  Variant (6)..(6): Xaa in position 6 is any amino acid
  Variant (8)..(8): Xaa in position 8 is Asp or Glu
  Variant (10)..(10): Xaa in position 10 is Ile or Val
  Variant (14)..(14): Xaa in position 14 is any amino acid
  Variant (15)..(15): Xaa in position 15 is Ala, Asp, Glu or Asn
  Variant (16)..(16): Xaa in position 16 is Ile, Leu or Val
  Variant (18)..(18): Xaa in position 18 is Glu, Lys or Arg
  Variant (19)..(19): Xaa in position 19 is Glu or Lys
EXXXVXWXDXGGLXXXKXXL

SEQ ID NO: 726 - protein, 26 aa, Artificial sequence
  protein pattern
  Variant (2)..(2): Xaa in position 2 is Ile, Leu or Met
  Variant (5)..(5): Xaa in position 5 is any amino acid
  Variant (6)..(6): Xaa in position 6 is Lys or Arg
  Variant (8)..(8): Xaa in position 8 is Ile or Val
  Variant (10)..(10): Xaa in position 10 is Phe or Leu
  Variant (11)..(11): Xaa in position 11 is His or Tyr
  Variant (16)..(16): Xaa in position 16 is Cys or Thr
  Variant (17)..(17): Xaa in position 17 is Gly or Ser
  Variant (20)..(20): Xaa in position 20 is any amino acid
  Variant (21)..(21): Xaa in position 21 is Leu or Met
  Variant (25)..(25): Xaa in position 25 is Ala, Ile or Val
GXSPXXGXLXXGPPGXXKTXXAKAXA

SEQ ID NO: 727 - protein, 7 aa, Artificial sequence
  protein pattern
LLTEMDG

SEQ ID NO: 728 - protein, 29 aa, Artificial sequence
  protein pattern
  Variant (6)..(7): Xaa in position 6 to 7 is any amino acid
  Variant (8)..(8): Xaa in position 8 is Ile or Leu
  Variant (10)..(10): Xaa in position 10 is Ala, Asn, Pro or Ser
  Variant (12)..(12): Xaa in position 12 is any or no amino acid
  Variant (14)..(14): Xaa in position 14 is any or no amino acid
  Variant (19)..(19): Xaa in position 19 is Phe or Leu
  Variant (21)..(21): Xaa in position 21 is any amino acid
  Variant (22)..(22): Xaa in position 22 is any or no amino acid
  Variant (24)..(25): Xaa in position 24 to 25 is any amino acid
  Variant (26)..(26): Xaa in position 26 is Ile, Pro or Val
  Variant (28)..(28): Xaa in position 28 is Leu or Pro
  Variant (29)..(29): Xaa in position 29 is Asp or Pro
ATNRPXXXDXAXLXRPGRXDXXLXXXPXX

SEQ ID NO: 729 - DNA, 1140 bp, Arabidopsis thaliana
  CDS (1)..(1140)
atgtgtggaggagctataatctccgatttcatacctccgccgaggtccctccgcgtcactaacgagtttatctggccggatctgaaaaacaaagtgaaagcttcaaagaagagatcgaataagcgatccgatttcttcgatcttgacgatgatttcgaagctgatttccaagggtttaaggatgactcggcttttgactgcgaagacgatgatgatgtcttcgtcaatgttaagcctttcgtcttcaccgcaactactaagcccgtagcttccgctttcgtctccactggtatatatttggtaggttcagcatatgccaagaaaactgtagagtccgctgagcaagctgagaaatcttctaagaggaagaggaagaatcaataccgagggattaggcagcgtccttggggaaaatgggctgcggagatccgtgatccgagaaaaggctcccgagaatggcttggaacattcgacactgctgaggaagcagcaagagcttatgatgctgcagcacgcagaatccgtggcacgaaagctaaggtgaattttcccgaggagaagaaccctagcgtcgtatcccagaaacgtcctagtgctaagactaataatcttcagaaatcagtggctaaaccaaacaaaagcgtaactttggttcagcagccaacacatctgagtcagcagtactgcaacaactcctttgacaactcttttggtgatatgagtttcatggaagagaagcctcagatgtacaacaatcagtttgggttaacaaactcgttcgatgctggaggtaacaatggataccagtatttcagttccgatcagggcagtaactccttcgactgttctgagttcgggtggagtgatcacggccctaaaacacccgagatctcttcaatgcttgtcaataacaacgaagcatcatttgttgaagaaaccaatgcagccaagaagctcaaaccaaactctgatgagtcagacgatctgatggcataccttgacaacgccttgtgggacaccccactagaagtggaagccatgcttggcgcagatgctggtgctgtgactcaggaagaggaaaacccagtggagctatggagcttagatgagatcaatttcatgctggaaggagacttttga

SEQ ID NO: 730 - protein, 379 aa, Arabidopsis thaliana
MCGGAIISDFIPPPRSLRVTNEFIWPDLKNKVKASKKRSNKRSDFFDLDDDFEADFQGFKDDSAFDCEDDDDVFVNVKPFVFTATTKPVASAFVSTGIYLVGSAYAKKTVESAEQAEKSSKRKRKNQYRGIRQRPWGKWAAEIRDPRKGSREWLGTFDTAEEAARAYDAAARRIRGTKAKVNFPEEKNPSVVSQKRPSAKTNNLQKSVAKPNKSVTLVQQPTHLSQQYCNNSFDNSFGDMSFMEEKPQMYNNQFGLTNSFDAGGNNGYQYFSSDQGSNSFDCSEFGWSDHGPKTPEISSMLVNNNEASFVEETNAAKKLKPNSDESDDLMAYLDNALWDTPLEVEAMLGADAGAVTQEEENPVELWSLDEINFMLEGDF

SEQ ID NO: 731 - DNA, 1889 bp, Glycine max
  CDS (163)..(1341)
gaaactcaattatacaaaaccctgaagaaagacacagccattgtttgtttactttccattgattgagcgaaagctttgttttttctgcgatcattttccattgggtggaagaaagtctcaacctttagtcgaaagagcaaggatctgagtgagtgagcgatcatgtgtggtggtgcgattatctccgacttcattccagcgggtcccgccggcggggcgcagcgcgtgaccgccgacatcctgtggccgaatttgaggaagcggttctcgaagtcgctgctggacgatgatttcgaggcagggttcagagaattcgaggatgactcggaaatcgaggatgtcgatgatgaggacgatgaagaggaggaggagttgaagaagaagaagccctttgggttctctcgctccaacaacaaggctgcttctaagcctctctctcgtggagcaacaactgtgaaatctgtggaatcaaaggggcaagctgagaagtgtgccaagagaaagaggaagaaccagtatcgcggaatccgccagcgtccatggggaaagtgggctgctgagattcgcgacccaagaaagggggttcgtgtttggcttggaactttcagcactgctgaagaagctgcaagagcttacgatgctgaagcaaggaggatccgtggcaagaaagccaaggtgaatttccctgatgagccttcaggcgctgcttcctcaaaacgtctcaaggcgaatccagaggctcagccaatgaagaaaaatctgaactctgtgaagccgaaaataaaccagatgttcaattttggtgacaatcttgagggctactacagccctatagatcaggtggaacagaaaccactggttaaccagtatgttaaccgtgccccgtttgctggaaatggagttcaagtctcacctgttactccatctgctgatgttactgcttacttcagctctgagcattcgagcagctcgtttgattattctgacctcggatggggtgaacaagtccccaagacacccgagatctcatccatgctttctgctgctcctttggacggtgaatctcagtttgtgcagggtgctgctgatcagaatcagaagaagaacaacctgctggatatggcatctgtgcaagatgattctgcaaaaactctttctgaggagcttgcagacattgaatcccagctgaagttctttgagaccccttcttttcttgatgaagcctgggctgatgctgcattggcgtctttgctcagtgaagatgcatctcaggatgctgctggaaaccctatgaacctttggagcttcgacgacctgccttccatggcaggagtcttctgaacaccttcatatccctttttatgtaaataaagctacaagaattgtgatcgtgatgttggtgatggaatccacagcaagaaaaccaacctgcttaaagcatatgtggagtttatttatcttgtagctaatgcagtataggactatatataggtttttatagggtatcctttgtgtgaaactcaagagacctcgttttcaggggattttctgtttgatgtccataaggattatcaattatgttatatatggtctgggatacagtcttgacttacagtttttaacttggttgttttcattgttatggcaatttgattatgatttgagaccagccatttttcaatgctttgtgtggtggatgattgcatatcgcctctattattttgcttactggttactcaggccatctttaatagatcgtccttggtgtaaagttttagctattaatggatgtggaaaagcttttttttttttctaaaccaatgttctgcaataattggctttgttgcagagattttaagtgttggaaatctagttgagagggaagtttt

SEQ ID NO: 732 - protein, 392 aa, Glycine max
MCGGAIISDFIPAGPAGGAQRVTADILWPNLRKRFSKSLLDDDFEAGFREFEDDSEIEDVDDEDDEEEEELKKKKPFGFSRSNNKAASKPLSRGATTVKSVESKGQAEKCAKRKRKNQYRGIRQRPWGKWAAEIRDPRKGVRVWLGTFSTAEEAARAYDAEARRIRGKKAKVNFPDEPSGAASSKRLKANPEAQPMKKNLNSVKPKINQMFNFGDNLEGYYSPIDQVEQKPLVNQYVNRAPFAGNGVQVSPVTPSADVTAYFSSEHSSSSFDYSDLGWGEQVPKTPEISSMLSAAPLDGESQFVQGAADQNQKKNNLLDMASVQDDSAKTLSEELADIESQLKFFETPSFLDEAWADAALASLLSEDASQDAAGNPMNLWSFDDLPSMAGVF

SEQ ID NO: 733 - DNA, 1700 bp, Zea mays
  CDS (115)..(1206)
ggccggggccggggcttccacagagtttcgtccaccatttggctcccgcaagcaccgatttgtttactgctctctccgacgcgcggcggcggagctccctacgacaactgaaccatgtgcggcggcgcgatccttgccaaccttcgcgagccggcgccgcgccggctcacagagcgggacatctggcagcagaagaagaagctcaagaggggcggcggcggcgggaggcgctcgttcgcggcggaggacgatgaggacttcgaggccgactttgaggtcttcgaggcagactccagtgattcagatttggagctcagggaggggactgacgacgacgtcgtcgagatcaagcccttcactgccaagaggactttctccagcgatggcttaagcaccatgactagtgctgtagcaaggtcagccaagaggaagagaaagaatctatacaggggtatccgccagcggccttggggcaagtgggctgctgagatcagagatcctcagaagggtgttcgtgtttggcttggtactttcaatagtcctgaggaagctgcaagagcttatgatgctgaagcgcgcaggattcgtggcaagaaggccaaggttaactttcctgatgcaccagcagttggtcagaagcgccgttctggctcagcttctgctaaagcatccaagtcaagttttggacagaagcctatcgtcaaagtagctatgaacaaccttgccaacacaaatgcatccttcttccaatctgctagctacccctccaattcatttgttcagcatggcaatataccatttgttccagcaatgaactctactgcttctgttgatgatcctatcatgaatctgcactctgaccagggaagtaactcctttggctgctcagacttgggctgggagaatgataccaagacaccagacatcacttccattgctcccatttccactattgcggaaggagacgagtctgcatttgttgacagcaattcaaacaactcatttgtgcttcctgccctggagaacagtgctgttgatctcactgatgggctgacagatttagaatcctatatgaggtttgttctggatggtggtccaagtgattcagttgatagccttctgaaccttgatggatcgcaggatgttggtagcgacatggacctctggagcttcgacgacatgcccatcgtcggcgatttcttttgaggattttgaagcttggtcataggagtatgtacatagggactaggggaataaagaccgggggagattgggaagcacctgcttggcaccttgggggtagcatttgctcgtgtctagctcagagatgcagaagttgcattctgaaactacttggttatcgacctgttccctattttagctatctctttatgagagccatttatgagactgaaccattttgttttgctttcttttcgttgttacaatatatggtttaacattatgatttatggatatgtgccaaatatggtgctcaacagtggtcaaacatgccttttagatgctcttgtttctcgtattgttgtgtaccttgtgatatttcattcgttgaaattgagttaaactagttatctgctgaaacttttcttgtacaagcaaaagtattcaagatttaatcttattggcatttggcaagatgctagacttttggtgccgaaaaaaaaaaaaaaaaagcggcc

SEQ ID NO: 734 - protein, 363 aa, Zea mays
MCGGAILANLREPAPRRLTERDIWQQKKKLKRGGGGGRRSFAAEDDEDFEADFEVFEADSSDSDLELREGTDDDVVEIKPFTAKRTFSSDGLSTMTSAVARSAKRKRKNLYRGIRQRPWGKWAAEIRDPQKGVRVWLGTFNSPEEAARAYDAEARRIRGKKAKVNFPDAPAVGQKRRSGSASAKASKSSFGQKPIVKVAMNNLANTNASFFQSASYPSNSFVQHGNIPFVPAMNSTASVDDPIMNLHSDQGSNSFGCSDLGWENDTKTPDITSIAPISTIAEGDESAFVDSNSNNSFVLPALENSAVDLTDGLTDLESYMRFVLDGGPSDSVDSLLNLDGSQDVGSDMDLWSFDDMPIVGDFF

SEQ ID NO: 735 - DNA, 1407 bp, Brassica napus
  CDS (90)..(1136)
agaaccccaaagaagctaatattcacggtttcgccgcaaagtttttatttccgaacatttaacacccctcaaaacagtttaacgccgccatgtgtggaggagctataatctccgaattcatccctccgccgaactcccgccgcgtcaccagcgagtttatctggccggatctgaaaaatctgaagaagaagaagtcgaggaagcgatctgatttcttggatctggacgatgaattcgaggctgatttcaaagggtttaaggatgatgattcgtcttttgactgcgaagatggattcgatgtgaagccctttgccttcaccgcagcttcccttcccaccaacgtcgcctccactggttcagtttctggcaagaaaaccatagagtctgatgagaaatctggcaagaggaagagaaagaatcagtacaggggaattaggctgcgcccatggggaaagtgggccgccgagatccgcgatcctaaaaaaggctcacgagaatggcttggaacgttcgaaaccgctgaggaagctgcaagagcttatgacgcagctgcgcgcaggatccgtggcggtaaagccaaggtgaacttccctgaggaggtgatcagtaatcttaagaagccagtggctaaaccaaaccataccccagctttggttcagccgccaacacatgtgggtcagtactgcaacaacaactcctttgacaacatgggacatgactccttgagttttatcgaggagaagcctcagatgtacaacaatcagttcttcgatgttggacagtatttcagctctgaccagggtagtaactcgtttgactgctctgagtttgggtggagtgatcacgcccccaagacaccaccggagatctcttcaatgctagtcaataacaaccgagctacgtttgatgaagaaaccaacgcagccaagaaggtcaaactcaactctgaggacgagacaagcgacaatgatgatctgatggcgtaccttgacaacgccctgtgggagtctcctttggaaatggaagctatgctcggcgtagatgttgctgctgatggtgtggctcagaaagaggcaaacccaatggagctgtggagcttagatgatatcaactttatgctggatggagacttctgaagtgtttgatgcgttgcctagtttgtaaataaagctgtgtgtgtgtgtgtgttggtgagtttcaagcccattgtgaagacaaacagccgtaacttttacttaatcttcagtttggtttttgtgtttgttgtctcacagggttttgttttgtatccctaagacttgtttaacaagtataataaaaacggtgttggaacctctgttttttttttatgattcttctctctgtttaattggtatatagttcttgtaaactgaaaaaaaaaaaaaa

SEQ ID NO: 736 - protein, 348 aa, Brassica napus
MCGGAIISEFIPPPNSRRVTSEFIWPDLKNLKKKKSRKRSDFLDLDDEFEADFKGFKDDDSSFDCEDGFDVKPFAFTAASLPTNVASTGSVSGKKTIESDEKSGKRKRKNQYRGIRLRPWGKWAAEIRDPKKGSREWLGTFETAEEAARAYDAAARRIRGGKAKVNFPEEVISNLKKPVAKPNHTPALVQPPTHVGQYCNNNSFDNMGHDSLSFIEEKPQMYNNQFFDVGQYFSSDQGSNSFDCSEFGWSDHAPKTPPEISSMLVNNNRATFDEETNAAKKVKLNSEDETSDNDDLMAYLDNALWESPLEMEAMLGVDVAADGVAQKEANPMELWSLDDINFMLDGDF

SEQ ID NO: 737 - DNA, 1589 bp, Brassica napus
  CDS (84)..(1226)
aaatatttcaaaagagaaccccaaagaagctaatacttaccgtttcgccgctaagtttacatttcagagcatttaacaccgccatgtgtggaggagctataatctccgatttcatacctccgtcgaggtcccgccgcgtcacgagcgagtacctctggccggatctgaaaaacaaagtgaaagcttcgaagaagaagaagcgatccgatttcctcgatctggacgacgagttcgaggctgactttcaagggtttaaggatggtgcatcgttcgattgcgaagatgaattcgatgtggatgatgaagtcttcgccgatgtcaaaccctttgtcttcgccgcaggtgccaagcccgtagcgtcccctcccgccgccttcgcctccgctggttcagtttctggcaagaaaaccatagagtctggtggacaagctgagaaatctgccaagagaaagaggaagaatcagtacagggggattaggcagcgcccttggggcaaatgggccgctgagatccgtgatcccagaaaaggctcccgggagtggcttggaacattcgacaccgccgaggaagcagcaagagcttatgatgcagctgcacgcaggatccgcggtaataaagctaaggtgaacttcccagaggagatggtccctagcgtctcccagaaacgccctgctgctaagaaggcagtggctaaaccaaaccaaagcccagcatccgttcagcagccaacacatgtgagtgagtactgcaacaactcctttgacaacatgggacatgacccctcttttggtgatgtgagtttcatggaagagaagcctcagatgtacaacaatcagttccttgatgtcggaggcaacaatggataccagtatttcagttctgaccagggcagtaactcactggactgctctgagtttgggtggagtgatcatacccccaagacacctgagatctcttcaatgctggtcaacagtaaccaagctcctttcattgaagaaaccaatccagccaagaagctcaaaaccaactctgaggacgggacaagcaacaatggtaattctgatgatctgatggcatatttgaacaacgccttgtgggagtctccattggaagtggaagctatgttcggtggtgatgctgctactatgactcaggaagagggaaccccaatggacctatggagcttcgatgatatcaactccatgctggatggtggagtcttctgaaagtgattgatgggttgcctagtttgtaaataaagctctttgtgtgttgggttttgctgttggccgggggaatggtacaagttcatacctggagcttattgcatcgttatcttatatgagtctctttctcacggagagcgtctctcttttaaattcctgaaataaaaggggtgatgaagtaaatagagttataatttctatctaatgagtctgtgagtttttttttttttgtttactaatgtttaaaactctctttttgatctttctttttatagcgtatcatcatcaccctcgaaagtgtttatgttttgtacccccaacactaatataaaaactgtctggaaccaggaaaaaaaaaaaaaa

SEQ ID NO: 738 - protein, 380 aa, Brassica napus
MCGGAIISDFIPPSRSRRVTSEYLWPDLKNKVKASKKKKRSDFLDLDDEFEADFQGFKDGASFDCEDEFDVDDEVFADVKPFVFAAGAKPVASPPAAFASAGSVSGKKTIESGGQAEKSAKRKRKNQYRGIRQRPWGKWAAEIRDPRKGSREWLGTFDTAEEAARAYDAAARRIRGNKAKVNFPEEMVPSVSQKRPAAKKAVAKPNQSPASVQQPTHVSEYCNNSFDNMGHDPSFGDVSFMEEKPQMYNNQFLDVGGNNGYQYFSSDQGSNSLDCSEFGWSDHTPKTPEISSMLVNSNQAPFIEETNPAKKLKTNSEDGTSNNGNSDDLMAYLNNALWESPLEVEAMFGGDAATMTQEEGTPMDLWSFDDINSMLDGGVF

SEQ ID NO: 739 - DNA, 1657 bp, Glycine max
  CDS (146)..(1294)
aaaaccctgaagaaagacacagccattgtttacttttcattgattgagccaaagctttgtattttctgcgataattttccattgggtggaagaaagtctcaacctttattcgaaagagcaaggatctgagttgagttgagtgatcatgtgtggtggtgcgattatctccgacttcataccggcaggtcccgccagcggggcgcggcgcgtgaccgccgacatcctgtggccgagtttgaggaagcgcttctcgaagccgctgctggacgatgatttcgaggctgggttcagagaattcaaggatgattcggaaatcgaggatgttgatgacgaggacgatgaagacgaggaggagttgaagaagaagccctttgggttctctcgctccagcaacaaggctgcttctaagcctctctctcgtggatcagcaactgtggaatcaaaggggcaagctgagaagtgtgccaagagaaagaggaagaaccagtatcgtggaatccgtcagcgtccatggggaaagtgggctgctgagatccgtgacccaagaaagggggttcgtgtttggcttggaactttcagcactgctgaagaagctgcaagagcttatgatgctgaagcaaggaggatccggggcaagaaagccaaggtgaatttcccggatgagccttcaggcgctgctgcttcctcaaaacgcctcaaggtgaatccagaggctcagccaatgaaggaaaatctgaacaccgtgaagccgaaaatgaaccagatgttcaattttggtcacaatctggagggctactacagcccaatagatcaggtggaacagaaaccactggttaaccagtatgttaaccctgccccgttccctggaaacggagttcaagtctcacctgttactccatctgctgatgttactgcttacttcagctctgagcattcgagcaactcgtttgattattctgaccttggatggggtgaacaagtccccaagacccccgagatctcatccttgctttctgctgctcctttggagggtgctgctgatcaggttcagaagaccaacaactcgcaggatgtggtggctgcacaagatgattctgcaaaaaccctttccgaagagcttgcagacattgaatcccagctcaagttctttgagaccccttcttttcttgatgaagcctgggctgatgctacattggcgtctttgctcggcggagacgcaactcatgacgccgccggaaaccctatgaacctttggagcttcgacgacctgccttccatggcaggagtcttctgaacaccctttatctccccttttatgtaaataaagctacaagaattgtgatcgtgatgttggtgatggagtccacagcaagaaacctgcttaaagcttatgtggagtttattttatcttgtagctaatgcagtagtataggactatatataggtttttattatagggtatccttttgtgaactcaaagacctcgttttcaggggattttctgtttgatgtccttaaggattatcaattatgttatatatggtcttggatacagtcttgactgctgatacagtttttttttaacttggttgttttcattttcattattattattatggcaatttgattatgattttgagaccaaaaaaaaaaaaaa

SEQ ID NO: 740 - protein, 382 aa, Glycine max
MCGGAIISDFIPAGPASGARRVTADILWPSLRKRFSKPLLDDDFEAGFREFKDDSEIEDVDDEDDEDEEELKKKPFGFSRSSNKAASKPLSRGSATVESKGQAEKCAKRKRKNQYRGIRQRPWGKWAAEIRDPRKGVRVWLGTFSTAEEAARAYDAEARRIRGKKAKVNFPDEPSGAAASSKRLKVNPEAQPMKENLNTVKPKMNQMFNFGHNLEGYYSPIDQVEQKPLVNQYVNPAPFPGNGVQVSPVTPSADVTAYFSSEHSSNSFDYSDLGWGEQVPKTPEISSLLSAAPLEGAADQVQKTNNSQDVVAAQDDSAKTLSEELADIESQLKFFETPSFLDEAWADATLASLLGGDATHDAAGNPMNLWSFDDLPSMAGVF

SEQ ID NO: 741 - DNA, 1602 bp, Brassica napus
  CDS (168)..(1259)
tggccacgcgtcgactagtacggggggggggcatcaaattatcaaaccacagcgagagagagagagagagaaaacaaaagagaaccccaaagaagctaatatttacagtttcgccgcaaagtttgtgtttctgaacatttaaccccctcgaatttgagttatacgccatgtgtggaggagctataatctccgatttcatccctccgccgagttcccgccgcgtcacgagcgagtttctctggccggatctgaagaagaacaaggggaaagcctcgaagaagcgatccgatttcttcgatctggacgacgagttcgaggctgattttcaagggtttgaggatgacgacgcgtcttttgactgcgaagacgatgatgatgatgtcttcgctaaagtgaagccctttgtcttcaccgcgaccaccaagcccgtagcttcccctcccaccgccactggttcagtgtctggcaagaagatcatagagtccggtggtcaagctgagaagtctgctaagagaaagagaaagaatcagtacagggggattaggcagcgaccttgggggaaatgggctgctgagatccgtgatcctagaaaaggctccagggaatggcttggaacattcgacaccgccgaggaagcagcaagagcctatgatgcagctgcacgcaggatccgtggtagtaaagctaaggtgaatttcccagaggagagcaacaacaaccgtagcgtctcccagaaacgaccttctgctaagaagctggtggctaaaccaaaccaaagcccagctttggttcagcagccaatgagtcagtactgcaacaactcctttggtgatgtgagtttcgtggaagagaagcctcagatgtacaacaatcagtttgggttagcaaactcgtacaacaaccactacttcagttctgatcaggggagtaactcatttgactgctctgagtttgggtggagcgaccacggccccaagacacctgagatctcttcgatgctagtcggtaataaccaagctccgttcactgaagaaaccaatgcagccaagaagctcaaacccagctctgatgacggaacaagcaaccagtctgatgatctgatggcataccttgacaatgccttgtgggaatctccatctccattagaagttgaagccatgcttggtgtagatgctgttgctgtgactcagggagaggagaacccgatggacctatggagcttagatgatatcaattacatgctggaaggagtcttctgaagtgagtgatggtttgcctaatttgtaaatagagctatgtgtgtgttggatttcgctgttgaagagggaacggtacaagtcacaacctggagcttattgcatcgtttttatcttatatatgagtctcttttaaattctctgaaataaatgggggtggtgattagtaaatagaggtataatctatctaatgagtcctcttccttcagttttttctttcttcttttctaagacagcttattaaatctattaagctctgtttttgatcttggtatcatcaccctcgcaagtgttttgttttgtcccatacttatttaacattatataatgaaaactatatggaagc

SEQ ID NO: 742 - protein, 363 aa, Brassica napus
MCGGAIISDFIPPPSSRRVTSEFLWPDLKKNKGKASKKRSDFFDLDDEFEADFQGFEDDDASFDCEDDDDDVFAKVKPFVFTATTKPVASPPTATGSVSGKKIIESGGQAEKSAKRKRKNQYRGIRQRPWGKWAAEIRDPRKGSREWLGTFDTAEEAARAYDAAARRIRGSKAKVNFPEESNNNRSVSQKRPSAKKLVAKPNQSPALVQQPMSQYCNNSFGDVSFVEEKPQMYNNQFGLANSYNNHYFSSDQGSNSFDCSEFGWSDHGPKTPEISSMLVGNNQAPFTEETNAAKKLKPSSDDGTSNQSDDLMAYLDNALWESPSPLEVEAMLGVDAVAVTQGEENPMDLWSLDDINYMLEGVF

SEQ ID NO: 743 - DNA, 957 bp, Arabidopsis thaliana
  CDS (1)..(957)
atgcgttcgaatttcttcgattttgacgctgagttcgaagctgatttccaaggtttcaaagatgattcgtctatcgattgcgatgatgatttcgacgtcggtgatgttttcgccgatgtgaaaccattcgttttcacttcgactccaaaacccgccgtctccgccgctgcggaaggttcagtttttggtaagaaagttactggcttggatggggacgctgagaaatctgcaaataggaagaggaagaatcagtaccgagggattaggcaacgtccttggggaaaatgggctgctgagatacgtgatccaagggaaggtgctagaatctggcttggaacgttcaagacagctgaggaagctgctagagcttacgatgctgcagcgcggagaatccgtggatctaaagctaaggtgaatttccctgaagaaaacatgaaggctaattctcagaaacgctctgtgaaggctaatcttcagaaaccagtggctaaacctaaccctaacccaagtccagctttggttcagaactcgaacatctcctttgaaaatatgtgtttcatggaggagaaacaccaagtgagcaacaacaacaacaaccagtttgggatgacaaactccgttgatgctggatgtaatgggtatcagtatttcagctctgaccagggtagtaattctttcgattgttcggagtttggttggagcgatcaagctccgataactcccgacatctcttctgcggttatcaacaacaacaactcagctctgttctttgaggaagccaatccagctaagaagctcaagtctatggatttcgagacaccttacaacaacactgaatgggacgcttcactggatttcctcaacgaagatgctgtaacgactcaggacaatggtgcaaaccctatggacctatggagtattgatgaaattcattccatgattggaggagtcttctga

SEQ ID NO: 744 - protein, 318 aa, Arabidopsis thaliana
MRSNFFDFDAEFEADFQGFKDDSSIDCDDDFDVGDVFADVKPFVFTSTPKPAVSAAAEGSVFGKKVTGLDGDAEKSANRKRKNQYRGIRQRPWGKWAAEIRDPREGARIWLGTFKTAEEAARAYDAAARRIRGSKAKVNFPEENMKANSQKRSVKANLQKPVAKPNPNPSPALVQNSNISFENMCFMEEKHQVSNNNNNQFGMTNSVDAGCNGYQYFSSDQGSNSFDCSEFGWSDQAPITPDISSAVINNNNSALFFEEANPAKKLKSMDFETPYNNTEWDASLDFLNEDAVTTQDNGANPMDLWSIDEIHSMIGGVF

SEQ ID NO: 745 - DNA, 1173 bp, Gossypium hirsutum
  CDS (1)..(1173)
atgtgtggaggtgctattatctccgatttcataccgccgtcgcagtcgcgacgattgacggccgatttcttgtggcccgatctgaaaaaatccgggttgaagaaggggtcgggtaagagatactcgaagcccgtgatcgacttgggcgatgatttcgagactgactttcaggagttcaaagatgaagaatctgatatagatgattatgatgttgatgatgttttggctgatgtaaagccctttgcttttaacgctacaaagaaacctgcttctgctgtctctcatggttcgaactctgaaaaatccatgcaattcaatggtcaagctgagaaatgtgcgaaaagaaagaggaagaaccagtatcgtggaatccggcagcgcccatggggtaaatgggctgctgagatccgtggcccaaggaaaggggttagggtctggttaggaactttcaatactgctgaagaagctgcgagagcttatgatgctgaggcacggagaattcgtggtaagaaagctaaggtgaacttccctaacgagactccgcgtacctctccaaagcatgcagtcaagacaaattctcagaaaccactttccaagtcaaattcgagccctgttcagccaaatctcaaccagaattacaattacttgaaccagcctgagcaggaatactttgataccatgggtttcgtagaagagaagccatcggtcaatcagttcgcatacgtggaccctgttcctacgtctatagatgctggatttaatcaatcagataatgcccccttgtacttcaattcagaccagggaagtaactcgatcaattgttccgactatggctggggagaacagggtgccaaaactcctgaaatatcatccattctggaagcttctgtagagggtgatgagtttcttgaggatgctaaccctagcaagaagctgaaaccaagttccgacaatgttatgcctgccgaagacaactccgcgaagaccttgtcggacgagctgttggctttggacaaccagatgaaatacttccaaatgccgccatttattgaaggaaactgggacgccactattgatgctttcctcaatggagatgcaacacaggatggtggaaacccgatggatctttggaactttgatgatttccctaccatggcggagggtgttttctga

SEQ ID NO: 746 - protein, 390 aa, Gossypium hirsutum
MCGGAIISDFIPPSQSRRLTADFLWPDLKKSGLKKGSGKRYSKPVIDLGDDFETDFQEFKDEESDIDDYDVDDVLADVKPFAFNATKKPASAVSHGSNSEKSMQFNGQAEKCAKRKRKNQYRGIRQRPWGKWAAEIRGPRKGVRVWLGTFNTAEEAARAYDAEARRIRGKKAKVNFPNETPRTSPKHAVKTNSQKPLSKSNSSPVQPNLNQNYNYLNQPEQEYFDTMGFVEEKPSVNQFAYVDPVPTSIDAGFNQSDNAPLYFNSDQGSNSINCSDYGWGEQGAKTPEISSILEASVEGDEFLEDANPSKKLKPSSDNVMPAEDNSAKTLSDELLALDNQMKYFQMPPFIEGNWDATIDAFLNGDATQDGGNPMDLWNFDDFPTMAEGVF

SEQ ID NO: 747 - DNA, 1077 bp, Arabidopsis thaliana
  CDS (1)..(1077)
atgtgtggaggagctataatatccgatttcattccaccgccgaggtctcgccgtgttactagcgagtttatttggccggatctgaagaagaatttgaaaggatcgaagaaaagctcgaagaatcgttcgaatttcttcgattttgacgctgagttcgaagctgatttccaaggtttcaaagatgattcgtctatcgattgcgatgatgatttcgacgtcggtgatgttttcgccgatgtgaaaccattcgttttcacttcgactccaaaacccgccgtctccgccgctgcggaaggttcagtttttggtaagaaagttactggcttggatggggacgctgagaaatctgcaaataggaagaggaagaatcagtaccgagggattaggcaacgtccttggggaaaatgggctgctgagatacgtgatccaagggaaggtgctagaatctggcttggaacgttcaagacagctgaggaagctgctagagcttacgatgctgcagcgcggagaatccgtggatctaaagctaaggtgaatttccctgaagaaaacatgaaggctaattctcagaaacgctctgtgaaggctaatcttcagaaaccagtggctaaacctaaccctaacccaagtccagctttggttcagaactcgaacatctcctttgaaaatatgtgtttcatggaggagaaacaccaagtgagcaacaacaacaacaaccagtttgggatgacaaactccgttgatgctggatgtaatgggtatcagtatttcagctctgaccagggtagtaattctttcgattgttcggagtttggttggagcgatcaagctccgataactcccgacatctcttctgcggttatcaacaacaacaactcagctctgttctttgaggaagccaatccagctaagaagctcaagtctatggatttcgagacaccttacaacaacactgaatgggacgcttcactggatttcctcaacgaagatgctgtaacgactcaggacaatggtgcaaaccctatggacctatggagtattgatgaaattcattccatgattggaggagtcttctga

SEQ ID NO: 748 - protein, 358 aa, Arabidopsis thaliana
MCGGAIISDFIPPPRSRRVTSEFIWPDLKKNLKGSKKSSKNRSNFFDFDAEFEADFQGFKDDSSIDCDDDFDVGDVFADVKPFVFTSTPKPAVSAAAEGSVFGKKVTGLDGDAEKSANRKRKNQYRGIRQRPWGKWAAEIRDPREGARIWLGTFKTAEEAARAYDAAARRIRGSKAKVNFPEENMKANSQKRSVKANLQKPVAKPNPNPSPALVQNSNISFENMCFMEEKHQVSNNNNNQFGMTNSVDAGCNGYQYFSSDQGSNSFDCSEFGWSDQAPITPDISSAVINNNNSALFFEEANPAKKLKSMDFETPYNNTEWDASLDFLNEDAVTTQDNGANPMDLWSIDEIHSMIGGVF

SEQ ID NO: 749 - DNA, 1379 bp, Capsicum annuum
  CDS (102)..(1229)
acgcggggaaattaaactttctccattgaaattcactgcgaaaaaaaaaccctttcccagttataatacactacttaaattattagagaaaagaaaaagctatgtgtggtggtgcaattatctccgatttggtacctcctagccggatttcccgccggctaaccgccgagttgctatggggtaactctgatctgagcaaaaagaagaaaaatccagggaattattactcaaagcctttgaacaggtctaagtttattgaccttgatgaggaatttgaagctgactttcaggacttcaaggactatgccgatgacgatgttgatgatgttaagcccttcggttccaaatctgtgaaatctggcgattcaagctgcgatactgaaaaatcttccaagagaaagaggaagaatcagtaccgggggatcagacagcgtccttggggtaagtgggcagctgaaattcgtgatccgaggaaagggattcgagtttggcttggaactttcaattctgcggaagaagcagctagagcttatgatgttgaggcacgaaggatcagaggcaagaaggctaaggtgaactttcctgatggatctccagcttctgcttcaagacgtgctgttaagccaaatcctcaggaggcacttcgcgaggaaatcttgaacacagttcagccgaacacaacttatatcaacaacttggacggcggatctgatgattcgtttggctttttcgaagagaaaccagcagcaaagcagtatggctatgagaatgtttcttttactgctggagatatgggactgggttcaatttccccttcaactggtacaacaaatgtttacttcagttctgatgaaggaagcaacacctttgactgctctgatttcggttggggtgaaccatgtccgaggactccagagatctcatctgttctgtcagaagttctagaatgtaatggtactcaatctgatgaagatgctagaccagagaaaaaactgaagtcgtgttccaacgcttccttgccagatgaggataacactgtgcacacgctatctgaagagctatcggcttttgaatcccagatgaagttcttgcagatcccatatcttgagggaaattgggatgcatcagttgatgcctttgtcaacacaggcgcaattcaggatggcggaaatgcgatggatctctggaccttcgatgatgttccttctttaatgggaggtgtctactaagccaacacgcaccttcccttactaagttttgtaaataaagcttcatttgagtgaagtttgcagttatgttgtctccaaacaaaaaagactatatatgtgttgtattaaatttatttcataaatttacttgtttgatacaaaaaaaaaaaa

SEQ ID NO: 750 - protein, 375 aa, Capsicum annuum
MCGGAIISDLVPPSRISRRLTAELLWGNSDLSKKKKNPGNYYSKPLNRSKFIDLDEEFEADFQDFKDYADDDVDDVKPFGSKSVKSGDSSCDTEKSSKRKRKNQYRGIRQRPWGKWAAEIRDPRKGIRVWLGTFNSAEEAARAYDVEARRIRGKKAKVNFPDGSPASASRRAVKPNPQEALREEILNTVQPNTTYINNLDGGSDDSFGFFEEKPAAKQYGYENVSFTAGDMGLGSISPSTGTTNVYFSSDEGSNTFDCSDFGWGEPCPRTPEISSVLSEVLECNGTQSDEDARPEKKLKSCSNASLPDEDNTVHTLSEELSAFESQMKFLQIPYLEGNWDASVDAFVNTGAIQDGGNAMDLWTFDDVPSLMGGVY

SEQ ID NO: 751 - DNA, 1191 bp, Gossypium hirsutum
  CDS (1)..(1191)
atgtgtggaggtgcgattatctccgatttcattccgcctgcgcggtcgcgactggtgacggcgaattatttgtggccggatctgaaaaaatccggctctaaaaagcggtcgggtagaaagcactcgaagaagccggcggtcggctttgaagatgacttcgaggctgattttcaggtgtttaaggatgaggattctgatgtcgatgacttcaacgatgatgttgatgatgttttggctgatgttaagtcctttgctttttctgctacaaagaaaccctctcctgctgtttctcatggttcaaactccataaaatctgtggaattcagtggtcaagctgagaaatctgcaaaaagaaagaggaagaaccagtatcgcggaattcgccagcgtccgtggggtaaatgggctgctgagatccgtgatcctaggaaaggggttagggtgtggcttggaacttttaatactgctgaggaagctgcacgagcttatgatgctgaggcactgagaattcggggtaagaaagcaaaggtgaacttccctgatgagactccacgtaccactccaaagcatgctgttaaaatgaattctcagaaacctctttccgggtcaaatttgagttctgttcaatcaagtctcaacccagatttcagttactcgaacaaacttgagcagggctactatgataccgtgggtttcattgaagagaagtcactaatggatcagtttgcatatgcagaccctgttagagctgctgtagatgatgggttaaaaccctttgctgaccctgagaataccgcttcgttttttatctcagatccagggagtaacaactttgacagttccgaccttgtctggggcgaccagggtgccaagactcctgaaatatcatcctctcttgaacctactctagaggtcaacgagtttctggacaacgcaaaccctacgaagaagttgaaactgagcttgaataatgtcatgcctactggaggagacaattcggtaaagagtttatccgatgagctattagctatggacaatcaagtgaactactttcagacaccatttattgacgagaactggaatgtttcgatggatgacttccttaatggagatgcaactcaggttggcggaaacgaaatgggtttttggagctttgatgactttccttccatagatgggggtattttctga

SEQ ID NO: 752 - protein, 396 aa, Gossypium hirsutum
MCGGAIISDFIPPARSRLVTANYLWPDLKKSGSKKRSGRKHSKKPAVGFEDDFEADFQVFKDEDSDVDDFNDDVDDVLADVKSFAFSATKKPSPAVSHGSNSIKSVEFSGQAEKSAKRKRKNQYRGIRQRPWGKWAAEIRDPRKGVRVWLGTFNTAEEAARAYDAEALRIRGKKAKVNFPDETPRTTPKHAVKMNSQKPLSGSNLSSVQSSLNPDFSYSNKLEQGYYDTVGFIEEKSLMDQFAYADPVRAAVDDGLKPFADPENTASFFISDPGSNNFDSSDLVWGDQGAKTPEISSSLEPTLEVNEFLDNANPTKKLKLSLNNVMPTGGDNSVKSLSDELLAMDNQVNYFQTPFIDENWNVSMDDFLNGDATQVGGNEMGFWSFDDFPSIDGGIF

SEQ ID NO: 753 - DNA, 1173 bp, Gossypium hirsutum
  CDS (1)..(1173)
atgtgtggaggtgctattatctccgatttcataccgccgtcgcggtcgcgacgattgacggccgatttcttgtggcccgatctgaaaaaatccgggttgaagaaggggtcgggtaagagatactcgaagcccgtgatcgacttgggcgatgatttcgagactgactttcaggagttcaaagatgaagaatctgatatagatgattatgatgttgatgatgttttggctgatgtaaagccctttgcttttaacgctacaaagaaacctgcttctgctgtctctcatggttcgaactctgaaaaatccatgcaattcaatggtcaagctgagaaatgtgcgaaaagaaagaggaagaaccagtatcgtggaatccggcagcgcccatggggtaaatgggctgctgagatccgtgacccaaggaaaggggttagggtctggttaggaactttcaatactgctgaagaagctgcgagagcttatgatgctgaggcacggagaattcgtggtaagaaagctaaggtgaacttccctaacgagactccgcgtacctctccaaagcatgcagtcaagacaaattctcagaaaccactttccaagtcaaattcgagccctgttcagccaaatctcaaccagaattacaattacttgaaccagcctgagcaggaatactttgataccatgggtttcgtagaagagaagccatcggtcaatcagttcgcatacgtggaccctgttcctacgtctatagatgctggatttaatcaatcagataatgcccccttgtacttcaattcagaccagggaagtaactcgatcaattgttccgactatggctggggagaacagggtgccaaaactcctgaaatatcatccattctggaagcttctgtagagggtgatgagtttcttgaggatgctaaccctagcaagaagctgaaaccaagttccgacaatgttatgcctgccgaagacaactccgcgaagaccttgtcggacgagctgttggctttggacaaccagatgaaatacttccaaatgccgccatttattgaaggaaactgggacgccactattgatgctttcctcaatggagatgcaacacaggatggtggaaacccgatggatctttggaactttgatgatttccctaccatggcggagggtgttttctga

SEQ ID NO: 754 - protein, 390 aa, Gossypium hirsutum
MCGGAIISDFIPPSRSRRLTADFLWPDLKKSGLKKGSGKRYSKPVIDLGDDFETDFQEFKDEESDIDDYDVDDVLADVKPFAFNATKKPASAVSHGSNSEKSMQFNGQAEKCAKRKRKNQYRGIRQRPWGKWAAEIRDPRKGVRVWLGTFNTAEEAARAYDAEARRIRGKKAKVNFPNETPRTSPKHAVKTNSQKPLSKSNSSPVQPNLNQNYNYLNQPEQEYFDTMGFVEEKPSVNQFAYVDPVPTSIDAGFNQSDNAPLYFNSDQGSNSINCSDYGWGEQGAKTPEISSILEASVEGDEFLEDANPSKKLKPSSDNVMPAEDNSAKTLSDELLALDNQMKYFQMPPFIEGNWDATIDAFLNGDATQDGGNPMDLWNFDDFPTMAEGVF

SEQ ID NO: 755 - DNA, 1460 bp, Manihot esculenta
  CDS (18)..(1163)
ctgcagcgacaaccaccatgtgtggcggtgctatcatctccgacttcatccctgccaccgctgctggccgatcctcgcgacggttgacagcggactttctctggcctgatctaaagaagcccattgggaaaatcgttggtgaccttgacgatgatttcgaggctgatttccaggagtttaaggatgagtctgatgtcgatgaggaagatgacgttttgtttgatgtcaagcctttctctttctctgctactgcttctcctcctcctcgcaatcgcagtccttcacgtggttctacagctgtaaagtctgtggaatttaatgggctagctgaaaaatctgcaaagagaaagagaaaaaaccagtacagaggaatccggcagcgcccatggggaaaatgggctgctgagattcgtgaccccaggaaaggggtgcgtgtctggctaggaacattcaatactgctgaagaagctgcaagagcgtatgatgctgaggcacgtagaattcgtggcaagaaagctaaagtgaactttcctgatgaagctccacgtgcttccccaaagcggacaatgaaggcaaaccctcagaaaccacttcctaagagaaatgctactgagagtatgagttacttgaacaatccagatcaggactacttcaatactttgggctctgttgatgagaaaccactagtgagccagtttgatttgatggactcttttcctgccaatggagatgctacagtcaaatctattcctccatgtgataatgttcccacgtttttcaattctgatcagggaagcaactcatttgaatgttccgactttggatggggggagcaggcctcaaagactcctgaaatctcatctgttctttcagctactccagaaattgatgaatcacttttcatggatgatgctaaccctaaaaagaagatgaagtctgactctgaaaatgcagttcctatagaagaaagcaatggaaaatctctatcagaggagttgttggcttttgacaaccagatgaactttcagatgccttatcttgagggaagttgggaggcttcacttgatggcttccttaatggagacgtgactcaggatggtggaaatccaatggacctgtggagctttgatgacctccctaatatggttgggggagtttattgagcaaaatcataattgccggttggcttctgtaaataaggctacatggatggttttctctctgaaatgtattacaagcacatctgaacatgcttaatcctttgaggagagtgtcctagggagcttttggtacaagagttgtagtaaataggaatatttagtttcccttttacattttgagacactggacttgggttgttcaatttaataactgtaattgacaatgtgcgtgtgatttgtgtttaaaactgatataaattttatctctactgttgtttttaaaaaaaaaaaaaaaaaaaa

SEQ ID NO: 756 - protein, 381 aa, Manihot esculenta
MCGGAIISDFIPATAAGRSSRRLTADFLWPDLKKPIGKIVGDLDDDFEADFQEFKDESDVDEEDDVLFDVKPFSFSATASPPPRNRSPSRGSTAVKSVEFNGLAEKSAKRKRKNQYRGIRQRPWGKWAAEIRDPRKGVRVWLGTFNTAEEAARAYDAEARRIRGKKAKVNFPDEAPRASPKRTMKANPQKPLPKRNATESMSYLNNPDQDYFNTLGSVDEKPLVSQFDLMDSFPANGDATVKSIPPCDNVPTFFNSDQGSNSFECSDFGWGEQASKTPEISSVLSATPEIDESLFMDDANPKKKMKSDSENAVPIEESNGKSLSEELLAFDNQMNFQMPYLEGSWEASLDGFLNGDVTQDGGNPMDLWSFDDLPNMVGGVY

SEQ ID NO: 757 - DNA, 1409 bp, Populus alba x Populus tremula
  CDS (20)..(1162)
ataatcaccatcaatcaacatgtgtggcggtgctatcatctcaggcttcatcgctccgacaaccaccgctcgatcttctcggcggttgacctcgggctttgagtggcttgagccgaagaaacccttcaacaacaagcacttgaagccagttgttgctgatcccgaagatgattttgaggctgatcttcaagagtttaaggacgagtctgatgtcgacgaggattatgatgtctttgctgatgccaagccttttgctttctctgccagtgcttctgaacctgctaaaaaacgtgggctccctcgtggttctactgctgttaaatctgctggattcagtggacttgctaaaaactcagcaaagaggaagagaaagaaccagtttagaggaattaggcagcgtccatggggaaaatgggctgctgagattcgtgatcccaggaaaggggtacgtgtctggttgggaacattcaatactgcagaagaagctgctagagcatatgattctgaggcacgtagaattcgtggcaagaaagcgaaggtgaacttccctgatgaagctccatgtgcttcagcaaggcatccaattaaggaaaactcacagaaacgacttacaaaggcaaatttaagccaggattttagttacttgagcaacccagaaacggattataataatatgggctttgtggaagagaaaccacaagtgagccagtttggaataatgaattctatcccggtcaatggagattctggggtgacgcccttaactccttctgacaatgcttctatgtatttcaattctgacaaggggagcaactcatttgattgtgactttgggtggggagaacaaggcgctgaaatcttgtctgttcttgcagcaactccagaagttgatgaatccgtctttgtggaagctaatcctaagaagttgaaatcatacactgagtatgcagtgcctgttgaagagaggaatggaaaatctctgtccgaagagttgctggcttttgacaatcagttgatgaaccttcagatgccagatcttgtgggtaactgggaggcttctcttgatagcttccttaatggagacacaactcaggatggcacaaacgcagtggacttgtggagcttcgaagacttcccctccatggttgggggagtttattgagccaacttttctgtgcttgccaggttttgtaaataataaggctacatgaatggttgtttatctgagatgggaatggagtgcaacacagatgaacatgcttagccttggtgtgggagaagcattctcaggagcattttccatataaaagtagtacatcggtttcccgtttcattacatttggagtcactggactttggaagttggattcgatgactgtaatttgacaatgtggtgtgacttatttaga

SEQ ID NO: 758 - protein, 380 aa, Populus alba x Populus tremula
MCGGAIISGFIAPTTTARSSRRLTSGFEWLEPKKPFNNKHLKPVVADPEDDFEADLQEFKDESDVDEDYDVFADAKPFAFSASASEPAKKRGLPRGSTAVKSAGFSGLAKNSAKRKRKNQFRGIRQRPWGKWAAEIRDPRKGVRVWLGTFNTAEEAARAYDSEARRIRGKKAKVNFPDEAPCASARHPIKENSQKRLTKANLSQDFSYLSNPETDYNNMGFVEEKPQVSQFGIMNSIPVNGDSGVTPLTPSDNASMYFNSDKGSNSFDCDFGWGEQGAEILSVLAATPEVDESVFVEANPKKLKSYTEYAVPVEERNGKSLSEELLAFDNQLMNLQMPDLVGNWEASLDSFLNGDTTQDGTNAVDLWSFEDFPSMVGGVY

SEQ ID NO: 759 - DNA, 1110 bp, Capsicum annuum
  CDS (1)..(1110)
atgtgtggtggtgcaattatctccgatttggtacctcctagccggatttcccgccggctaaccgccgagttgctatggggtaactctgatctgagcaaaaagaagaaaaatccagggaattattactcaaagcctttgaacaggtctaagtttattgaccttgatgaggaatttgaagctgactttcaggacttcaaggactatgccgatgacgatgttgatgatgttaagcccttcggttccaaatctgtgaaatctggcgattcaagctgcgatactgaaaaatcttccaagagaaagaggaagaatcagtaccgggggatcagacagcgtccttggggtaagtgggcagctgaaattcgtgatccgaggaaagggattcgagtttggcttggaactttcaattctgcggaagaagcagctagagcttatgatgttgaggcacgaaggatcagaggcaagaaggctaaggtgaactttcctgatggatctccagcttctgcttcaagacgtgctgttaagccaaatcctcaggaggcacttcgcgaggaaatcttgaacacagttcagccgaacacaacttatatcaacaacttggacggcggatctgatgattcgtttggctttttcgaagagaaaccagcagcaaagcagtatggctatgagaatgtttcttttactgctggagatatgggactgggttcaatttccccttcaactggtacaacaaatgtttacttcagttctgatgaaggaagcaacacctttgactgctctgatttcggttggggtgaaccatgtccgaggactccagagatctcatctgttctgtcagaagttctagaatgtaatggtactcaatctgatgaagatgctagaccagagaaaaaactgaagtcgtgttccaacgcttccttgccagatgaggataacactgtgcacacgctatctgaagagctatcggcttttgaatcccagatgaagttcttgcagatcccatatcttgagggaaattgggatgcatcagttgatgcctttgtcaacacaggcgcaattcaggatggcggaaatgcgatggatctctggccttcgatgatgttccttctttaa

SEQ ID NO: 760 - protein, 369 aa, Capsicum annuum
MCGGAIISDLVPPSRISRRLTAELLWGNSDLSKKKKNPGNYYSKPLNRSKFIDLDEEFEADFQDFKDYADDDVDDVKPFGSKSVKSGDSSCDTEKSSKRKRKNQYRGIRQRPWGKWAAEIRDPRKGIRVWLGTFNSAEEAARAYDVEARRIRGKKAKVNFPDGSPASASRRAVKPNPQEALREEILNTVQPNTTYINNLDGGSDDSFGFFEEKPAAKQYGYENVSFTAGDMGLGSISPSTGTTNVYFSSDEGSNTFDCSDFGWGEPCPRTPEISSVLSEVLECNGTQSDEDARPEKKLKSCSNASLPDEDNTVHTLSEELSAFESQMKFLQIPYLEGNWDASVDAFVNTGAIQDGGNAMDLWPSMMFLL

SEQ ID NO: 761 - DNA, 984 bp, Lycopersicon esculentum
  CDS (1)..(984)
atgtgtggtggttctataatctccgattacatagaccctagccggacttctcgccggctcaccgccgagtttctatggggtcgtttcgatctcggtaagaagcaaaaaaatcccaacaattatcactctaaagctaagcatttgcgatctgaagttgttgacgactttgaagccgattttcaggacttcaaagagttatccgatgatgaggatgttcaagtcgatgtcaagccatttgccttctctgcttccaaacactctactggttccaaatctttgaaaactgttgattcagacaaggatgctgctgctgataaatcctctaagagaaagaggaagaatcaatatagagggatcagacagagaccttggggtaagtgggcagctgaaatacgtgacccaaggaaaggggttcgggtctggctgggaaccttcaatactgcagaagaagctgccaaagcttatgatattgaggcgaggaggatcagaggcaagaaggctaaggtaaactttcctgatgaagctcccgcccctgcatcaagacacactgttaaggtgaatcctcagaaggtccttcctgaggagagcctgtattcacttcagtccgactcagcaatcatgaacagcgtggaggatgaccattatgattcttttggattttttgaagagaaacccatgacaaaacagtatggatatgagaatgggagcagtgcttctgcagatacgggatttggttcgttcgtcccttcagctggcggtgatatctacttcaactctgatgtaggaagcaactcttttgaatgctctgattttggttggggagagccatgctccaggactccagagatatcatctgttctgtcagctgctattgaatgtaatgaagctcaatttgttgaagatgccaattctcagaaaaagttgaaatcatgcaccaacaaccccgtagctgatgatggaaacccccgttactatggtacctga

SEQ ID NO: 762 - protein, 327 aa, Lycopersicon esculentum
MCGGSIISDYIDPSRTSRRLTAEFLWGRFDLGKKQKNPNNYHSKAKHLRSEVVDDFEADFQDFKELSDDEDVQVDVKPFAFSASKHSTGSKSLKTVDSDKDAAADKSSKRKRKNQYRGIRQRPWGKWAAEIRDPRKGVRVWLGTFNTAEEAAKAYDIEARRIRGKKAKVNFPDEAPAPASRHTVKVNPQKVLPEESLYSLQSDSAIMNSVEDDHYDSFGFFEEKPMTKQYGYENGSSASADTGFGSFVPSAGGDIYFNSDVGSNSFECSDFGWGEPCSRTPEISSVLSAAIECNEAQFVEDANSQKKLKSCTNNPVADDGNPRYYGT

SEQ ID NO: 763 - DNA, 1137 bp, Fagus sylvatica
  CDS (1)..(1137)
atgtgtggaggagctataatctccgactttatagcgccaaccgggtcgcggcggttgacggcggattatctctggggcgatcggaaaaaacccatttcaggaaagcgattctcgaagcctgtagtcgatttggacgacgaattcgagctcgattttcagggctttaaggacgaggaggagtctgatatcgacgaggaagaggtccttgtgcaagatgtcaagcccttcactttttctgctcctcctagctctggatctaagcctgtaaaatccgtggaattcaatgggcaagctgagaaatctgcaaagagaaagaggaagaatcagtatcgggggatccggcagcgcccatggggtaagtgggctgctgagattcgagacccaaggaaaggggtccgtgtctggcttggaacttttaacactgcagaaaaagctgcaagagcttatgatgcagaggcacggagaattcgtggcaagaaggctaaggtgaattttcccgatgagactccccgtgcttctccaaagcgttcagttaaggcaaatctgcagaagccacttgccaaggcaaacctgaactctgtccagcccaacctgaaccaaaatttcaattttatgaacaactctgatcaggactataccatgggtttgatggaagagaaacctttcacaaaccagtatgggtatatggattccatccctgccaatgcagatgttggactaaaaccctttgcttccaataatactaccccgtactttaactcagatcaggggagtaactcgtttgattgttctgactatggatggggagaacagggctctaagactccagaaatctcatctgttctttcagctactttagaaggggatgaatctcagtttgtggaggatgctatgcccacgaagaaattgaagtcagactctgggaatgcagtgttcattgaaaataacactgcaaagacactgtcagaggagctctcagcttttgagtcccagatgaactttcagatgccatttcttgagggaagctgggaatccaacatggaggcactgttcagtggggacacaactcaggatggtaactcgatggatctttggagcttcgatgacctccccgttatggctgggggagttctgtga

SEQ ID NO: 764 - protein, 378 aa, Fagus sylvatica
MCGGAIISDFIAPTGSRRLTADYLWGDRKKPISGKRFSKPVVDLDDEFELDFQGFKDEEESDIDEEEVLVQDVKPFTFSAPPSSGSKPVKSVEFNGQAEKSAKRKRKNQYRGIRQRPWGKWAAEIRDPRKGVRVWLGTFNTAEKAARAYDAEARRIRGKKAKVNFPDETPRASPKRSVKANLQKPLAKANLNSVQPNLNQNFNFMNNSDQDYTMGLMEEKPFTNQYGYMDSIPANADVGLKPFASNNTTPYFNSDQGSNSFDCSDYGWGEQGSKTPEISSVLSATLEGDESQFVEDAMPTKKLKSDSGNAVFIENNTAKTLSEELSAFESQMNFQMPFLEGSWESNMEALFSGDTTQDGNSMDLWSFDDLPVMAGGVL

SEQ ID NO: 765 - DNA, 1155 bp, Glycine max
  CDS (1)..(1155)
atgtgtggtggtgcgattatctccgacttcataccggcaggtcccgccagcggggcgcggcgcgtgaccgccgacatcctgtggccgagtttgaggaagcgcttctcgaagccgctgctggacgatgatttcgaggctgggttcagagaattcaaggatgattcggaaatcgaggatgttgatgacgaggacgatgaagacgaggaggagttgaagaagaagccctttgggttctctcgctccagcaacaaggctgcttctaagcctctctctcgtggagcaacaactgtgaaatctgtggaatcaaaggggcaagctgagaagtgtgccaagagaaagaggaagaaccagtatcgcggaatccgccagcgtccatggggaaagtgggctgctgagattcgcgacccaagaaagggggttcgtgtttggcttggaactttcagcactgctgaagaagctgcaagagcttacgatgctgaagcaaggaggatccgtggcaagaaagccaaggtgaatttccctgatgagccttcaggcgctgcttcctcaaaacgtctcaaggcgaatccagaggctcagccaatgaagaaaaatctgaactctgtgaagccgaaaataaaccagatgttcaattttggtgacaatcttgagggctactacagccctatagatcaggtggaacagaaaccactggttaaccagtatgttaaccgtgccccgtttgctggaaatggagttcaagtctcacctgttactccatctgctgatgttactgcttacttcagctctgagcattcgagcaactcgtttgattattctgaccttggatggggtgaacaagtccccaagacccccgagatctcatccttgctttctgctgctcctttggagggtgctgctgatcaggttcagaagaccaacaactcgcaggatgtggtggctgcacaagatgattctgcaaaaaccctttccgaagagcttgcagacattgaatcccagctcaagttctttgagaccccttcttttcttgatgaagcctgggctgatgctacattggcgtctttgctcggcggagacgcaactcatgacgccgccggaaaccctatgaacctttggagcttcgacgacctgccttccatggcaggagtcttctga

SEQ ID NO: 766 - protein, 384 aa, Glycine max
MCGGAIISDFIPAGPASGARRVTADILWPSLRKRFSKPLLDDDFEAGFREFKDDSEIEDVDDEDDEDEEELKKKPFGFSRSSNKAASKPLSRGATTVKSVESKGQAEKCAKRKRKNQYRGIRQRPWGKWAAEIRDPRKGVRVWLGTFSTAEEAARAYDAEARRIRGKKAKVNFPDEPSGAASSKRLKANPEAQPMKKNLNSVKPKINQMFNFGDNLEGYYSPIDQVEQKPLVNQYVNRAPFAGNGVQVSPVTPSADVTAYFSSEHSSNSFDYSDLGWGEQVPKTPEISSLLSAAPLEGAADQVQKTNNSQDVVAAQDDSAKTLSEELADIESQLKFFETPSFLDEAWADATLASLLGGDATHDAAGNPMNLWSFDDLPSMAGVF

SEQ ID NO: 767 - DNA, 1164 bp, Nicotiana tabacum
  CDS (1)..(1164)
atgtgtggtggtgctataatctccgattacattgccccgagccgaacttctcgccggctcaccgccgagttgctatggggccggtccgatctgagtaataagcaaaaaaatcctaacaattatcactccaagccgttgagatcccaagtagttgacctagacgatgacttcgaggctgattttcaggactttaaagatttctccgatgacgaggatgttcaagtcgatgtcaagccatttgccttctctgcttcgaaaaactctaatgttgaaggctccaaatctgtgaaaactgatgattcagacaaggatgctgatagatcctctaagagaaagaggaagaatcagtatagggggatcagacagcgaccttggggtaagtgggcagctgaaatacgtgacccaagaaaaggggttcgggtgtggctgggaactttcaatactgcagaagaagctgccagagcttatgatgttgaggctaggaggatcagaggcaataaagctaaggtaaactttcccgatgaagctccagtgcctgcctcgagacgtactgttaaggtgaatcctcaaaaggtccttcctaaggagatcctggactcggttcagcccgactcgactatcataaacaacatggaggattgctgttatgattctttgggatttcttgaagagaaacccatgacgaagcagtttggatgtgaggatgggagcagtgcttctggagatacgggatttggctcatttgccccttcagctggtaccgatatctacttcaactctgatgttggaagtaactcttttgactgctctgattttggttggggagagccatgtgccaggactccagagatatcatccgttctgtcagctgttattgaaagcaatgaatctcaacttgttgaagatgataccagtccaatgaaaaaactgaaatcaagccccattaatccagtagctgatgatggaaataccgcaaacaagctatctgaagagctttcagcttttgaaacccagatgaagttccttcagatcccctatctggagggaaattgggatgcatcagttgatactttcctcaactcaagtgcaactcaggatggtgataatgctatggacttatggtcctttgatgatgttccttctttattgggaggtgtcttttaa

SEQ ID NO: 768 - protein, 387 aa, Nicotiana tabacum
MCGGAIISDYIAPSRTSRRLTAELLWGRSDLSNKQKNPNNYHSKPLRSQVVDLDDDFEADFQDFKDFSDDEDVQVDVKPFAFSASKNSNVEGSKSVKTDDSDKDADRSSKRKRKNQYRGIRQRPWGKWAAEIRDPRKGVRVWLGTFNTAEEAARAYDVEARRIRGNKAKVNFPDEAPVPASRRTVKVNPQKVLPKEILDSVQPDSTIINNMEDCCYDSLGFLEEKPMTKQFGCEDGSSASGDTGFGSFAPSAGTDIYFNSDVGSNSFDCSDFGWGEPCARTPEISSVLSAVIESNESQLVEDDTSPMKKLKSSPINPVADDGNTANKLSEELSAFETQMKFLQIPYLEGNWDASVDTFLNSSATQDGDNAMDLWSFDDVPSLLGGVF

SEQ ID NO: 769 - DNA, 1568 bp, Arabidopsis thaliana
  CDS (131)..(1207)
aaaaacaacaaagcaaagcgttgaagagagaagaagaagcaaagatataacccccaaaagtatcaattagtttccattttcgccgctaagattctgttttcgaacatttacaccctcaagaatcgccgccatgtgtggaggagctataatatccgatttcattccaccgccgaggtctcgccgtgttactagcgagtttatttggccggatctgaagaagaatttgaaaggatcgaagaaaagctcgaagaatcgttcgaatttcttcgattttgacgctgagttcgaagctgatttccaaggtttcaaagatgattcgtctatcgattgcgatgatgatttcgacgtcggtgatgttttcgccgatgtgaaaccattcgttttcacttcgactccaaaacccgccgtctccgccgctgcggaaggttcagtttttggtaagaaagttactggcttggatggggaagctgagaaatctgcaaataggaagaggaagaatcagtaccgagggattaggcaacgtccttggggaaaatgggctgctgagatacgtgatccaagggaaggtgctagaatctggcttggaacgttcaagacagctgaggaagctgctagagcttacgatgctgcagcgcggagaatccgtggatctaaagctaaggtgaatttccctgaagaaaacctgaaggctaattctcagaaacgctctgtgaaggctaatcttcagaaaccagtggctaaacctaaccctaacccaagtccagctttggttcagaactcgaacatctcctttgaaaatatgtgtttcatggaggagaaacaccaagtgagcaacaacaacaacaaccagtttgggatgacaaactccgttgatgctggatgtaatgggtatcagtatttcagctctgaccagggtagtaattctttcgattgttcggagtttggttggagcgatcaagctccgataactcccgacatctcttctgcggttatcaacaacaacaactcagctctgttctttgaggaagccaatccagctaagaagctcaagtctatggatttcgagacaccttacaacaacactgaatgggacgcttcactggatttcctcaacgaagatgctgtaacgactcaggacaatggtgcaaaccctatggacctatggagtattgatgaaattcattccatgattggaggagtcttctgaagagatccagtttcatgtaaataaggctgcatgtttgtgagtttcccgcatcgttcgtttatcaacctccaaaactttctaatgtctgttacttgcatcttcttctgctgtctctgtctgtctctctcaggagttcctgtttgcattgcgagaagccatgagcctctatcttgagggtagttgtgatgaagttaagtagaggcttatttttaggggttgtggtagtttttgttttagtgaatcttttgaattcgtttgtgttttgtttttgttactttatgccccaaaactcctttaacatttgtcataatgtgtttgaacctcctcatctgtttaatcaaataaatcttctttgtatgct

SEQ ID NO: 770 - protein, 358 aa, Arabidopsis thaliana
MCGGAIISDFIPPPRSRRVTSEFIWPDLKKNLKGSKKSSKNRSNFFDFDAEFEADFQGFKDDSSIDCDDDFDVGDVFADVKPFVFTSTPKPAVSAAAEGSVFGKKVTGLDGEAEKSANRKRKNQYRGIRQRPWGKWAAEIRDPREGARIWLGTFKTAEEAARAYDAAARRIRGSKAKVNFPEENLKANSQKRSVKANLQKPVAKPNPNPSPALVQNSNISFENMCFMEEKHQVSNNNNNQFGMTNSVDAGCNGYQYFSSDQGSNSFDCSEFGWSDQAPITPDISSAVINNNNSALFFEEANPAKKLKSMDFETPYNNTEWDASLDFLNEDAVTTQDNGANPMDLWSIDEIHSMIGGVF

SEQ ID NO: 771 - DNA, 1391 bp, Lycopersicon esculentum
  CDS (87)..(1205)
ttcaaattgagctttttctccattaaaattctctctgcaaatttatagtttttcttttttcactttttgagaagaaatcaaaagctatgtgtggtggtgcaattatctccgatttggtacctcctagccggatttctcgccggttaaccgctgattttctatggggtacatccgatctgaacaagaagaagaagaaccctagtaattaccactcaaagcccttgaggtctaagtttattgaccttgaagatgaatttgaagctgactttcagcacttcaaggataattctgatgatgatgatgatgtgaaggcatttggccccaaatccgtgagatctggtgattcaaactgcgaagctgacagatcctccaagagaaagaggaagaatcagtaccgggggatcagacagcgtccttggggtaagtgggcagctgaaatacgtgatccaaggaaaggtattcgagtctggcttggtactttcaattcagccgaagaggcagccagagcttatgatgctgaggcgcgaaggatcagaggcaagaaagctaaggtgaactttcctgatgaagctccagtgtctgtttcaagacgtgctattaagcaaaatccccaaaaggcacttcgtgaggaaaccctgaacacagttcagcccaacatgacttatattagtaacttggatggtggatctgatgattcgttcagttttttcgaagagaaaccagcaaccaagcagtacggcttcgagaatgtgtcttttactgctgtagatatgggactgggctcagtttccccttcagctggtacaaatgtttacttcagctctgatgaagcaagtaacacttttgactgctctgatttcggttgggctgaaccgtgtgcaaggactccagagatctcatctgttctgtcggaagttctggaaaccaatgagactcattttgatgatgattccagaccagagaaaaaactgaagtcctgttccagcacttcattgacagttgacggtaacactgtgaacacgctatctgaagagctatcggcttttgaatcccagatgaagttcttgcagatcccatatctcgagggaaattgggatgcatcggttgatgccttcctcaatacaagtgcaattcaggatggtggaaacgccatggacctttggtccttcgatgatgtaccttctttaatgggaggtgcctactaagctgcatacacatcttcccctgctaagttttgtaaataacgcttcatttgagtgaagtttgcgcctgcgtttacgtttatcaccaaactaaaagactatatatgtgttgtattaatttattcaaaatttactcgtttgatatatgtaagtatgtatccttgttttcataaaaaaaaaaaaaaaaaa

SEQ ID NO: 772 - protein, 372 aa, Lycopersicon esculentum
MCGGAIISDLVPPSRISRRLTADFLWGTSDLNKKKKNPSNYHSKPLRSKFIDLEDEFEADFQHFKDNSDDDDDVKAFGPKSVRSGDSNCEADRSSKRKRKNQYRGIRQRPWGKWAAEIRDPRKGIRVWLGTFNSAEEAARAYDAEARRIRGKKAKVNFPDEAPVSVSRRAIKQNPQKALREETLNTVQPNMTYISNLDGGSDDSFSFFEEKPATKQYGFENVSFTAVDMGLGSVSPSAGTNVYFSSDEASNTFDCSDFGWAEPCARTPEISSVLSEVLETNETHFDDDSRPEKKLKSCSSTSLTVDGNTVNTLSEELSAFESQMKFLQIPYLEGNWDASVDAFLNTSAIQDGGNAMDLWSFDDVPSLMGGAY

SEQ ID NO: 773 - DNA, 1128 bp, Fagus sylvatica
  CDS (1)..(1128)
atgtgtggaggagctataatctccgactttatagcgccaaccgggtcgcggcggttgacggcggattatctctggggcgatcggaaaaaacccatttcaggaaagcgattctcgaagcctgtagtcgatttggacgacgaattcgagctcgattttcagggcttcaaggacgaggaggagtctgatatcgacgaggaagaggtccttgtgcaagatgtcaagcccttcactttttctgctcctcctagctctggatctaagcctgtaaaatccgtggaattcaatgggcaagctgagaaatctgcaaagagaaagaggaagaatcagtatcgggggatccggcagcgcccatggggtaagtgggctgctgagattcgagacccaaggaaaggggtccgtgtctggctcggaacttttaacactgcagaagaagctgcaagagcttatgatgcagaagcacggagaattcgtggcaagaaaagcaaagggaattttccgatgagacttcccgtgccaaagcgttcagttaaggcaaatctgcagaagccacttgccaaggcaaacctgaactctgtccagcccaacctgaaccaaaatttcaattttatgaactctgatcaggactataccatgggtttgatggaagagaaacctttcacgaaccagtatgggtatatggattccatccctgtcaatgcagatgttggactaaaatcctttgcttccaataatactgccccatactttaactcagatcaggggagtaactcgtttgattgttctgactatggatggggagaacagggctctaagactccagaaatctcatctgttctttcagccactttagaaggggatgaatctcagtttgtggaggatgctgtgcccacgaagaaattgaagtcagactctgggaatgcagtgttcattgaaaataacactgcaaagacactgtcagaggagctctcagcttttgagtcccagatgaactttcagatgccatttcttgagggaagctgggaatccaacatggaggcactgttcagtggggacacaactcaggatggtaactcgatggatctttggagcttcgatgacctccccgttatggctgggggagttctgtga

SEQ ID NO: 774 - protein, 375 aa, Fagus sylvatica
MCGGAIISDFIAPTGSRRLTADYLWGDRKKPISGKRFSKPVVDLDDEFELDFQGFKDEEESDIDEEEVLVQDVKPFTFSAPPSSGSKPVKSVEFNGQAEKSAKRKRKNQYRGIRQRPWGKWAAEIRDPRKGVRVWLGTFNTAEEAARAYDAEARRIRGKKSKGNFPMRLPVPKRSVKANLQKPLAKANLNSVQPNLNQNFNFMNSDQDYTMGLMEEKPFTNQYGYMDSIPVNADVGLKSFASNNTAPYFNSDQGSNSFDCSDYGWGEQGSKTPEISSVLSATLEGDESQFVEDAVPTKKLKSDSGNAVFIENNTAKTLSEELSAFESQMNFQMPFLEGSWESNMEALFSGDTTQDGNSMDLWSFDDLPVMAGGVL

SEQ ID NO: 775 - DNA, 1568 bp, Brassica napus
  CDS (133)..(1194)
gaattcccgggtcgacgatttcgtgagagagagagaaaacaaaagagaaccccaaagaagctaatatttacagtttcgccgcaaagtttgtgtttctgaacatttaaccccctcgaatttgagttatacgccatgtgtggaggagctataatctccgatttcatccctccgccgagtttccgccgcgtcacgagcgagtttctctggccggatctgaagaagagcaaggggaaagcctcgaagaagcgatccgatttcttcgatctggacgacgagttcgaggctgattttcaagggtttgaggatgacgacgcgtcttttgactgcgaagacgatgatgatgaagtcttcgctaaagtgaagccctttgtcttcaccgcgaccaccaagcccgtagcttcccctcccactggttcagtgtctggcaagaagatcatagagtccggtggtcaagctgagaagtctgctaagagaaagagaaagaatcagtacagggggattaggcagcgaccttgggggaaatgggctgctgagatccgtgatccaagaaaaggctccagggaatggcttggaacgtttgacaccgccgaggaagctgcaagagcctatgatgcaactgcacgcagaatccgcggcagtaaagccaaggtgaatttcccagaggagagcaacaacaaccgtagcgtctcccagaaacgaccttctgctaagaagctggtggctaaaccaaaccaaagcccagctttggttcagcagccaatgagtcagtactacaacaacgcctttggtgatgtgagtttcatggaagagaagcctcagatgtacaacaatcagtttggtttagcaaactcgtacaacaaccagtacttcagttctgatcagggcagcaactcatttgactgctctgagtttgggcggagcgatcacggtcccaagacacctgagatctcttcaatgctggttaataataaccaaactccgttcattgaagtaaccaatgcagccaagaagctcaaacccagctctgatgatctgatggcataccttgacaatgccttgtgggaatctccatctccattggaagttgaagccatgctgggtgtagatgctgccgctgtgactcagggagaggagaaccctatggacctatggagcttagatgatattaattacatgctggaaggagtcttctgaagtgatcgatggttgcctagtttgttgtaaataaagtcatgtgtgtgttggaatttgctgttgaagggggaatggtacaagtcacaacctggagcttattgcatcgtttttatcttatatatgagtctcttttaaattctctgaaataaatgggggtggtgattagtaaatagaggtataatctatctaatgagtcctcttccttcagtttttttctttcttcttttctaagacagcttattaaatctattaagctctgtttttgatcttggtatcatcaccctcgcaagtgttttgttttgtacccattatacaatgaaaactatttggaagctctgtttgtaatgtgaaaaaaaaaaaaaaaaaaaaaaaaa

SEQ ID NO: 776 - protein, 353 aa, Brassica napus
MCGGAIISDFIPPPSFRRVTSEFLWPDLKKSKGKASKKRSDFFDLDDEFEADFQGFEDDDASFDCEDDDDEVFAKVKPFVFTATTKPVASPPTGSVSGKKIIESGGQAEKSAKRKRKNQYRGIRQRPWGKWAAEIRDPRKGSREWLGTFDTAEEAARAYDATARRIRGSKAKVNFPEESNNNRSVSQKRPSAKKLVAKPNQSPALVQQPMSQYYNNAFGDVSFMEEKPQMYNNQFGLANSYNNQYFSSDQGSNSFDCSEFGRSDHGPKTPEISSMLVNNNQTPFIEVTNAAKKLKPSSDDLMAYLDNALWESPSPLEVEAMLGVDAAAVTQGEENPMDLWSLDDINYMLEGVF

SEQ ID NO: 777 - DNA, 1143 bp, Brassica napus
  CDS (1)..(1143)
atgtgtggaggagctataatctccgatttcatacctccgtcgaggtcccgccgcgtcacgagcgagtacctctggccggatctgaaaaacaaagtgaaagcttcgaagaagaagaagcgatccgatttcctcgatctggacgacgagttcgaggctgactttcaagggtttaaggatggtgcatcgttcgattgcgaagatgaattcgatgtggatgatgaagtcttcgccgatgtcaaaccctttgtcttcgccgcaggtgccaagcccgtagcgtcccctcccgccgccttcgcctccgctggttcagtttctggcaagaaaaccatagagtctggtggacaagctgagaaatctgccaagagaaagaggaagaatcagtacagggggattaggcagcgcccttggggcaaatgggccgctgagatccgtgatcccagaaaaggctcccgggagtggcttggaacattcgacaccgccgaggaagcagcaagagcttatgatgcagctgcacgcaggatccgcggtaataaagctaaggtgaacttcccagaggagatggtccctagcgtctcccagaaacgccctgctgctaagaaggcagtggctaaaccaaaccaaagcccagcatccgttcagcagccaacacatgtgagtgagtactgcaacaactcctttgacaacatgggacatgacccctcttttggtgatgtgagtttcatggaagagaagcctcagatgtacaacaatcagttccttgatgtcggaggcaacaatggataccagtatttcagttctgaccagggcagtaactcactggactgctctgagtttgggtggagtgatcatacccccaagacacctgagatctcttcaatgctggtcaacagtaaccaagctcctttcattgaagaaaccaatccagccaagaagctcaaaaccaactctgaggacgggacaagcaacaatggtaattctgatgatctgatggcatatttgaacaacgccttgtgggagtctccattggaagtggaagctatgttcggtggtgatgctgctactatgactcaggaagagggaaccccaatggacctatggagcttcgatgatatcaactccatgctggatggtggagtcttctga

SEQ ID NO: 778 - protein, 380 aa, Brassica napus; identical to SEQ ID NO: 738

SEQ ID NO: 779 - DNA, 1086 bp, Brassica napus
  CDS (1)..(1086)
atgtgtggaggagctataatctccgatttcatccctccgccgagtttccgccgcgtcacgagcgagtttctctggccggatctgaagaagagcaaggggaaagcctcgaagaagcgatccgatttcttcgatctggacgacgagttcgaggctgattttcaagggtttgaggatgacgacgcgtcttttgactgcgaagacgatgatgatgaagtcttcgctaaagtgaagccctttgtcttcaccgcgaccaccaagcccgtagcttcccctcccactggttcagtgtctggcaagaagatcatagagtccggtggtcaagctgagaagtctgctaagagaaagagaaagaatcagtacagggggattaggcagcgaccttgggggaaatgggctgctgagatccgtgatccaagaaaaggctccagggaatggcttggaacgtttgacaccgccgaggaagctgcaagagcctatgatgcagctgcacgcagaatccgcggcagtaaagccaaggtgaatttcccagaggagagcaacaacaaccgtagcgtctcccagaaacgaccttctgctaagaagctggtggctaaaccaaaccaaagcccagctttggttcagcagccaatgagtcagtactacaacaacgcctttggtgatgtgagtttcatggaagagaagcctcagatgtacaacaatcagtttgggttagcaaactcgtacaacaaccactacttcagttctgatcaggggagtaactcatttgactgctctgagtttgggtggagcgaccacggccccaagacacctgagatctcttcgatgctagtcggtaataaccaagctccgttcactgaagaaaccaatgcagccaagaagctcaaacccagctctgatgacggaacaagcaaccagtctgatgatctgatggcataccttgacaatgccttgtgggaatctccatctccattggaagttgaagccatgctgggtgtagatgctgccgctgtgactcagggagaggagaaccctatggacctatggagcttagatgatattaattacatgctggaaggagtcttctga

SEQ ID NO: 780 - protein, 361 aa, Brassica napus
MCGGAIISDFIPPPSFRRVTSEFLWPDLKKSKGKASKKRSDFFDLDDEFEADFQGFEDDDASFDCEDDDDEVFAKVKPFVFTATTKPVASPPTGSVSGKKIIESGGQAEKSAKRKRKNQYRGIRQRPWGKWAAEIRDPRKGSREWLGTFDTAEEAARAYDAAARRIRGSKAKVNFPEESNNNRSVSQKRPSAKKLVAKPNQSPALVQQPMSQYYNNAFGDVSFMEEKPQMYNNQFGLANSYNNHYFSSDQGSNSFDCSEFGWSDHGPKTPEISSMLVGNNQAPFTEETNAAKKLKPSSDDGTSNQSDDLMAYLDNALWESPSPLEVEAMLGVDAAAVTQGEENPMDLWSLDDINYMLEGVF

SEQ ID NO: 781 - DNA, 954 bp, Brassica napus
  CDS (1)..(954)
atgtgtggaggagcaataatctccgatttcattccgccgccgaggtctcgccgcgtcaccagcgagtttctctggccggatctgaagaagagctcgaagaaacgctcgagtttcttcgatcttgacgatgagttcgaggctgacttccagggcttcaaggatgattcctctatcgattgcgatgatgcgaagccgttcgttttcgccggggctcgtaaacccgccgtctccgccgccactgccgattcagttattggcaagaaagttgctgacggagaaggtgagaggtctgcaaagaggaagaggaagagccagtaccgagggataaggcaacgtccttggggaaaatgggctgctgagattcgtgatccaagggaaggttcaagagtttggcttggaacttttaaaacagccgaggaagctgcaagagcttacgacgctgcagctcgtagaatccgtggttccaaagctaaggtgaatttccctgaggagaaggagaacccacctgccaagaaggtggctccaaacccaagtccagttttggctcagaacttggacaactcctttgacaacatgtgtttcatggaggagaagcaccaagttaacaacaacaacaatcagtttggtggtaatggatatcatcagtatttcagctcagaccagggtagtaactcattcggttgttctgagtttggttggaacgatcaagctcctataactcctgagatctcctctgcttttatcaacaacaactctgccacattcgccgaggaagctgatccagctaagcagctcaaggtcatggattttgagacaacttacaacagcactgaatgggattcttcacttgatttcttcagtggagacgctgtggcgactcaggacaatggtgcaaatcctatggagctatggagcattgatgagatcaattccatgatgggaggagtcttctaa

SEQ ID NO: 782 - protein, 317 aa, Brassica napus
MCGGAIISDFIPPPRSRRVTSEFLWPDLKKSSKKRSSFFDLDDEFEADFQGFKDDSSIDCDDAKPFVFAGARKPAVSAATADSVIGKKVADGEGERSAKRKRKSQYRGIRQRPWGKWAAEIRDPREGSRVWLGTFKTAEEAARAYDAAARRIRGSKAKVNFPEEKENPPAKKVAPNPSPVLAQNLDNSFDNMCFMEEKHQVNNNNNQFGGNGYHQYFSSDQGSNSFGCSEFGWNDQAPITPEISSAFINNNSATFAEEADPAKQLKVMDFETTYNSTEWDSSLDFFSGDAVATQDNGANPMELWSIDEINSMMGGVF

SEQ ID NO: 783 - DNA, 954 bp, Brassica napus
  CDS (1)..(954)
atgtgtggaggagcaataatctccgatttcatcccgccgccgaggtctcgccgcgtcaccagcgagtttctctggccggatctgaagaagagctcgaagaaacgctcgagtttcttcgatcttgacgatgagttcgaggctgacttccagggcttcaaggatgattcctctatcgattgcgatgatgcgaagccgttcgttttcgccggggctcgtaagcccgccgtatccgccgccactgccgattcagtgtttggcaagaaagttgttgatggagaaggtgagaggtctgcaaagaggaagaggaagagccagtaccgagggataaggcaacgtccttggggcaaatgggctgctgagattcgtgatccaagggaaggttcaagagtttggcttggaacttttaaaacagccgaggaagctgcaagagcttatgatgctgcagctcgtagaatccgtggttccaaagctaaggtgaatttccctgaggagaaggagaacccacctgccaagaaggtggctccaaacccaagtccagttttggctcagaacttggacaactcctttgacaacatgtgtttcatggaggagaagcaccaagttaacaacaacagcaatcagtttggtggtaatggatatcatcagtatttcagctcagaccagggtagtaactcattcggttgttctgagttcggttggaacgatcaagctcctataactcctgagatctcctctgcttttatcaacaacaactctgtcacattcgccgaggaagctgatccagctaagcagctcaaggtcatggattttgagacaacttacaacagcactgaatgggattcttcacttgatttcttcagtggagacgctgtggcgactcaggacaatggtgcaaatcctatggagctatggagcattgatgagatcaattccatgattggaggagtcttctaa

SEQ ID NO: 784 - protein, 317 aa, Brassica napus
MCGGAIISDFIPPPRSRRVTSEFLWPDLKKSSKKRSSFFDLDDEFEADFQGFKDDSSIDCDDAKPFVFAGARKPAVSAATADSVFGKKVVDGEGERSAKRKRKSQYRGIRQRPWGKWAAEIRDPREGSRVWLGTFKTAEEAARAYDAAARRIRGSKAKVNFPEEKENPPAKKVAPNPSPVLAQNLDNSFDNMCFMEEKHQVNNNSNQFGGNGYHQYFSSDQGSNSFGCSEFGWNDQAPITPEISSAFINNNSVTFAEEADPAKQLKVMDFETTYNSTEWDSSLDFFSGDAVATQDNGANPMELWSIDEINSMIGGVF

SEQ ID NO: 785 - DNA, 1092 bp, Brassica napus
  CDS (1)..(1092)
atgtgtggaggagctataatctccgatttcatccctccgccgagtttccgccgcgtcacgagcgagtttctctggccggatctgaagaagagcaaggggaaagcctcgaagaagcgatccgatttcttcgatctggacgacgagttcgaggctgattttcaagggtttgaggatgacgacgcgtcttttgactgcgaagacgatgatgatgatgtcttcgctaaagtgaagccctttgtcttcaccgcgaccaccaagcccgtagcttcccctcccaccgccactggttcagtgtctggcaagaagatcatagagtccggtggtcaagctgagaagtctgctaagagaaagagaaagaatcagtacagggggattaggcagcgaccttggggaaaatgggctgctgagatccgtgatcctagaaaaggctccagggaatggcttggaacattcgacaccgccgaggaagcagcaagagcctatgatgcagctgcacgcaggatccgtggtagtaaagctaaggtgaatttcccagaggagagcaacaacaaccgtagcgtctcccagaaacgaccttctgctaagaagctggtggctaaaccaaaccaaagcccagctttggttcagcagccaatgagtcagtactgcaacaactcctttggtgatgtgagtttcgtggaagagaagcctcagatgtacaacaatcagtttgggttagcaaactcgtacaacaaccactacttcagttctgatcaggggagtaactcatttgactgctctgagtttgggtggagcgaccacggccccaagacacctgagatctcttcgatgctagtcggtaataaccaagctccgttcactgaagaaaccaatgcagccaagaagctcaaacccagctctgatgacggaacaagcaaccagtctgatgatctgatggcataccttgacaatgccttgtgggaatctccatctccattagaagttgaagccatgcttggtgtagatgctgttgctgtgactcagggagaggagaacccgatggacctatggagcttagatgatatcaattacatgctggaaggagtcttctga

SEQ ID NO: 786 - protein, 363 aa, Brassica napus
MCGGAIISDFIPPPSFRRVTSEFLWPDLKKSKGKASKKRSDFFDLDDEFEADFQGFEDDDASFDCEDDDDDVFAKVKPFVFTATTKPVASPPTATGSVSGKKIIESGGQAEKSAKRKRKNQYRGIRQRPWGKWAAEIRDPRKGSREWLGTFDTAEEAARAYDAAARRIRGSKAKVNFPEESNNNRSVSQKRPSAKKLVAKPNQSPALVQQPMSQYCNNSFGDVSFVEEKPQMYNNQFGLANSYNNHYFSSDQGSNSFDCSEFGWSDHGPKTPEISSMLVGNNQAPFTEETNAAKKLKPSSDDGTSNQSDDLMAYLDNALWESPSPLEVEAMLGVDAVAVTQGEENPMDLWSLDDINYMLEGVF

SEQ ID NO: 787 - DNA, 1062 bp, Brassica napus
  CDS (1)..(1062)
atgtgtggaggagctataatctccgatttcatccctccgccgagtttccgccgcgtcacgagcgagtttctctggccggatctgaagaagagcaaggggaaagcctcgaagaagcgatccgatttcttcgatctggacgacgagttcgaggctgattttcaagggtttgaggatgacgacgcgtcttttgactgcgaagacgatgatgatgaagtcttcgctaaagtgaagccctttgtcttcaccgcgaccaccaagcccgtagcttcccctcccactggttcagtgtctggcaagaagatcatagagtccggtggtcaagctgagaagtctgctaagagaaagagaaagaatcagtacagggggattaggcagcgaccttgggggaaatgggctgctgagatccgtgatccaagaaaaggctccagggaatggcttggaacgtttgacaccgccgaggaagctgcaagagcctatgatgcaactgcacgcagaatccgcggcagtaaagccaaggtgaatttcccagaggagagcaacaacaaccgtagcgtctcccagaaacgaccttctgctaagaagctggtggctaaaccaaaccaaagcccagctttggttcagcagccaatgagtcagtactacaacaacgcctttggtgatgtgagtttcatggaagagaagcctcagatgtacaacaatcagtttggtttagcaaactcgtacaacaaccagtacttcagttctgatcagggcagcaactcatttgactgctctgagtttgggcggagcgatcacggtcccaagacacctgagatctcttcaatgctggttaataataaccaaactccgttcattgaagtaaccaatgcagccaagaagctcaaacccagctctgatgatctgatggcataccttgacaatgccttgtgggaatctccatctccattggaagttgaagccatgctgggtgtagatgctgccgctgtgactcagggagaggagaaccctatggacctatggagcttagatgatattaattacatgctggaaggagtcttctga

SEQ ID NO: 788 - protein, 353 aa, Brassica napus; identical to SEQ ID NO: 776

SEQ ID NO: 789 - DNA, 1092 bp, Brassica napus
  CDS (1)..(1092)
atgtgtggaggagctataatctccgatttcatccctccgccgagttcccgccgcgtcacgagcgagtttctctggccggatctgaagaagaacaaggggaaagcctcgaagaagcgatccgatttcttcgatctggacgacgagttcgaggctgattttcaagggtttgaggatgacgacgcgtcttttgactgcgaagacgatgatgatgatgtcttcgctaaagtgaagccctttgtcttcaccgcgaccaccaagcccgtagcttcccctcccaccgccactggttcagtgtctggcaagaagatcatagagtccggtggtcaagctgagaagtctgctaagagaaagagaaagaatcagtacagggggattaggcagcgaccttgggggaaatgggctgctgagatccgtgatcctagaaaaggctccagggaatggcttggaacattcgacaccgccgaggaagcagcaagagcctatgatgcagctgcacgcaggatccgtggtagtaaagctaaggtgaatttcccagaggagagcaacaacaaccgtagcgtctcccagaaacgaccttctgctaagaagctggtggctaaaccaaaccaaagcccagctttggttcagcagccaatgagtcagtactgcaacaactcctttggtgatgtgagtttcgtggaagagaagcctcagatgtacaacaatcagtttgggttagcaaactcgtacaacaaccactacttcagttctgatcaggggagtaactcatttgactgctctgagtttgggtggagcgaccacggccccaagacacctgagatctcttcgatgctagtcggtaataaccaagctccgttcactgaagaaaccaatgcagccaagaagctcaaacccagctctgatgacggaacaagcaaccagtctgatgatctgatggcataccttgacaatgccttgtgggaatctccatctccattagaagttgaagccatgcttggtgtagatgctgttgctgtgactcagggagaggagaacccgatggacctatggagcttagatgatatcaattacatgctggaaggagtcttctga

SEQ ID NO: 790 - protein, 363 aa, Brassica napus; identical to SEQ ID NO: 742

SEQ ID NO: 791 - DNA, 1038 bp, Glycine max
  CDS (1)..(1038)
atgtgtggaggagctatcatctctgatttcattccggcggcggcgatcgccgggtctcgccgcctgaccgccgattacctgtggccggatttgaagaagcggaagtctgacttggacgttgacttcgaggctgatttcagggattttaaagacgattctgatatcgacgacgacgacgacgatcaccaagtcaagccctttgctttcgccgcctcttctcgtctgtctacggcagcgaaatctgtggcattccaaggtcgggctgagatatctgcaaatagaaagaggaagaatcagtataggggaatccgtcaacgcccttggggaaaatgggcagctgagattcgggatccaagaaagggggttcgtgtctggcttggaaccttcaacactgctgaagaagctgcaagagcttatgatgctgaagcacggaggattcgtggcaagaaagccaaggtgaattttcctgaggcaccaggtacttcttctgtaaaacgttccaaggtaaatccacaggaaaatcttaagactgttcagcccaatctgggtcacaagttcagtgctggcaacaatcacatggatctggtggaacagaaacccctagttagccagtatgctaacatggcttccttccctggcagtggaaatgggctaagatcccttccttcgtctgatgatgcaaccctttacttcagttcagatcaagggagtaattcatttgattatgctcctgagatctcatccatgctttctgctcctttggattgtgaatctcattttgtgcaaaatgccaaccagcagcagcctaactctcagaatgtggtatctattgaagatgattctgcaaagacactctctgaggagcttgtggatattgaatctgagttgaagttctttcagatgccttatcttgaagggagctggggcgatacttcattggaatccttgctatctggtgacacaactcaggatggtggaaacctcatgaacctttggtgctttgatgacattccttccatggctggtggagttttctga

SEQ ID NO: 792 - protein, 345 aa, Glycine max
MCGGAIISDFIPAAAIAGSRRLTADYLWPDLKKRKSDLDVDFEADFRDFKDDSDIDDDDDDHQVKPFAFAASSRLSTAAKSVAFQGRAEISANRKRKNQYRGIRQRPWGKWAAEIRDPRKGVRVWLGTFNTAEEAARAYDAEARRIRGKKAKVNFPEAPGTSSVKRSKVNPQENLKTVQPNLGHKFSAGNNHMDLVEQKPLVSQYANMASFPGSGNGLRSLPSSDDATLYFSSDQGSNSFDYAPEISSMLSAPLDCESHFVQNANQQQPNSQNVVSIEDDSAKTLSEELVDIESELKFFQMPYLEGSWGDTSLESLLSGDTTQDGGNLMNLWCFDDIPSMAGGVF

SEQ ID NO: 793 - DNA, 1149 bp, Glycine max
  CDS (1)..(1149)
atgtgtggtggtgcgattatctccgacttcataccggcaggtcccgccagcggggcgcggcgcgtgaccgccgacatcctgtggccgagtttgaggaagcgcttctcgaagccgctgctggacgatgatttcgaggctgggttcagagaattcaaggatgattcggaaatcgaggatgttgatgacgaggacgatgaagacgaggaggagttgaagaagaagccctttgggttctctcgctccagcaacaaggctgcttctaagcctctctctcgtggatcagcaactgtggaatcaaaggggcaagctgagaagtgtgccaagagaaagaggaagaaccagtatcgtggaatccgtcagcgtccatggggaaagtgggctgctgagatccgtgacccaagaaagggggttcgtgtttggcttggaactttcagcactgctgaagaagctgcaagagcttatgatgctgaagcaaggaggatccggggcaagaaagccaaggtgaatttcccggatgagccttcaggcgctgctgcttcctcaaaacgcctcaaggtgaatccagaggctcagccaatgaaggaaaatctgaacaccgtgaagccgaaaatgaaccagatgttcaattttggtcacaatctggagggctactacagcccaatagatcaggtggaacagaaaccactggttaaccagtatgttaaccctgccccgttccctggaaacggagttcaagtctcacctgttactccatctgctgatgttactgcttacttcagctctgagcattcgagcaactcgtttgattattctgaccttggatggggtgaacaagtccccaagacccccgagatctcatccttgctttctgctgctcctttggagggtgctgctgatcaggttcagaagaccaacaactcgcaggatgtggtggctgcacaagatgattctgcaaaaaccctttccgaggagcttgcagacattgaatcccagctcaagttctttgagaccccttcttttcttgatgaagcctgggctgatgctacattggcgtctttgctcggcggagacgcaactcatgacgccgccggaaaccctatgaacctttggagcttcgacgacctgccttccatggcaggagtcttctga

SEQ ID NO: 794 - protein, 382 aa, Glycine max; identical to SEQ ID NO: 740

SEQ ID NO: 795 - DNA, 1149 bp, Glycine max
  CDS (1)..(1149)
atgtgtggtggtgcgattatctccgacttcataccggcaggtcccgccagcggggcgcggcgcgtgaccgccgacatcctgtggccgagtttgaggaagcgcttctcgaagccgctgctggacgatgatttcgaggctgggttcagagaattcaaggatgattcggaaatcgaggatgttgatgacgaggacgatgaagacgaggaggagttgaagaagaagccctttgggttctctcgctccagcaacaaggctgcttctaagcctctctctcgtggatcagcaactgtggaatcaaaggggcaagctgagaagtgtgccaagagaaagaggaagaaccagtatcgtggaatccgtcagcgtccatggggaaagtgggctgctgagatccgtgacccaagaaagggggttcgtgtttggcttggaactttcagcactgctgaagaagctgcaagagcttatgatgctgaagcaaggaggatccggggcaagaaagccaaggtgaatttcccggatgagccttcaggcgctgctgcttcctcaaaacgcctcaaggtgaatccagaggctcagccaatgaaggaaaatctgaacaccgtgaagccgaaaatgaaccagatgttcaattttggtcacaatctggagggctactacagcccaatagatcaggtggaacagaaaccactggttaaccagtatgttaaccctgccccgttccctggaaacggagttcaagtctcacctgttactccatctgctgatgttactgcttacttcagctctgagcattcgagcaactcgtttgattattctgaccttggatggggtgaacaagtccccaagacccccgagatctcatccttgctttctgctgctcctttggagggtgctgctgatcaggttcagaagaccaacaactcgcaggatgtggtggctgcacaagatgattctgcaaaaaccctttccgaagagcttgcagacattgaatcccagctcaagttctttgagaccccttcttttcttgatgaagcctgggctgatgctacattggcgtctttgctcggcggagacgcaactcatgacgccgccggaaaccctatgaacctttggagcttcgacgacctgccttccatggcaggagtcttctga

SEQ ID NO: 796 - protein, 382 aa, Glycine max; identical to SEQ ID NO: 740

SEQ ID NO: 797 - DNA, 1179 bp, Glycine max
  CDS (1)..(1179)
atgtgtggtggtgcgattatctccgacttcattccagcgggtcccgccggcggggcgcagcgcgtgaccgccgacatcctgtggccgaatttgaggaagcggttctcgaagtcgctgctggacgatgatttcgaggcagggttcagagaattcgaggatgactcggaaatcgaggatgtcgatgatgaggacgatgaagaggaggaggagttgaagaagaagaagccctttgggttctctcgctccaacaacaaggctgcttctaagcctctctctcgtggagcaacaactgtgaaatctgtggaatcaaaggggcaagctgagaagtgtgccaagagaaagaggaagaaccagtatcgcggaatccgccagcgtccatggggaaagtgggctgctgagattcgcgacccaagaaagggggttcgtgtttggcttggaactttcagcactgctgaagaagctgcaagagcttacgatgctgaagcaaggaggatccgtggcaagaaagccaaggtgaatttccctgatgagccttcaggcgctgcttcctcaaaacgtctcaaggcgaatccagaggctcagccaatgaagaaaaatctgaactctgtgaagccgaaaataaaccagatgttcaattttggtgacaatcttgagggctactacagccctatagatcaggtggaacagaaaccactggttaaccagtatgttaaccgtgccccgtttgctggaaatggagttcaagtctcacctgttactccatctgctgatgttactgcttacttcagctctgagcattcgagcagctcgtttgattattctgacctcggatggggtgaacaagtccccaagacacccgagatctcatccatgctttctgctgctcctttggacggtgaatctcagtttgtgcagggtgctgctgatcagaatcagaagaagaacaacctgctggatatggcatctgtgcaagatgattctgcaaaaactctttctgaggagcttgcagacattgaatcccagctgaagttctttgagaccccttcttttcttgatgaagcctgggctgatgctgcattggcgtctttgctcagtgaagatgcatctcaggatgctgctggaaaccctatgaacctttggagcttcgacgacctgccttccatggcaggagtcttctga

SEQ ID NO: 798 - protein, 392 aa, Glycine max; identical to SEQ ID NO: 732

SEQ ID NO: 799 - DNA, 31 bp, Artificial sequence
  primer
atagagctcccgcgtcactaacgagtttatc

SEQ ID NO: 800 - DNA, 29 bp, Artificial sequence
  primer
atacccgggtcagcttgctcagcggactc

SEQ ID NO: 801 - DNA, 23 bp, Artificial sequence
  primer
atgtgtggaggagctataatctc

SEQ ID NO: 802 - DNA, 22 bp, Artificial sequence
  primer
tcaaaagtctccttccagcatg

SEQ ID NO: 803 - DNA, 31 bp, Artificial sequence
  primer
ataccatggccgcgtcactaacgagtttatc

SEQ ID NO: 804 - DNA, 31 bp, Artificial sequence
  primer
atattaattaatcagcttgctcagcggactc

SEQ ID NO: 805 - DNA, 31 bp, Artificial sequence
  primer
ataggtaccccgcgtcactaacgagtttatc

SEQ ID NO: 806 - DNA, 29 bp, Artificial sequence
  primer
atagtcgactcagcttgctcagcggactc

SEQ ID NO: 807 - protein, 435 aa, Artificial sequence
  consensus sequence
  Variant (13)..(15): Xaa in position 13 to 15 is any amino acid
  Variant (16)..(20): Xaa in position 16 to 20 is any or no amino acid
  Variant (23)..(23): Xaa in position 23 is any amino acid
  Variant (25)..(27): Xaa in position 25 to 27 is any amino acid
  Variant (30)..(30): Xaa in position 30 is any amino acid
  Variant (31)..(51): Xaa in position 31 to 51 is any or no amino acid
  Variant (53)..(55): Xaa in position 53 to 55 is any amino acid
  Variant (56)..(57): Xaa in position 56 to 57 is any or no amino acid
  Variant (60)..(60): Xaa in position 60 is any amino acid
  Variant (61)..(61): Xaa in position 61 is any or no amino acid
  Variant (67)..(68): Xaa in position 67 to 68 is any amino acid
  Variant (70)..(70): Xaa in position 70 is any amino acid
  Variant (72)..(73): Xaa in position 72 to 73 is any amino acid
  Variant (74)..(76): Xaa in position 74 to 76 is any or no amino acid
  Variant (78)..(81): Xaa in position 78 to 81 is any amino acid
  Variant (82)..(92): Xaa in position 82 to 92 is any or no amino acid
  Variant (96)..(96): Xaa in position 96 is any amino acid
  Variant (98)..(102): Xaa in position 98 to 102 is any amino acid
  Variant (103)..(122): Xaa in position 103 to 122 is any or no amino acid
  Variant (124)..(127): Xaa in position 124 to 127 is any amino acid
  Variant (128)..(132): Xaa in position 128 to 132 is any or no amino acid
  Variant (136)..(136): Xaa in position 136 is any amino acid
  Variant (167)..(167): Xaa in position 167 is any amino acid
  Variant (169)..(169): Xaa in position 169 is any amino acid
  Variant (175)..(175): Xaa in position 175 is any amino acid
  Variant (187)..(187): Xaa in position 187 is any amino acid
  Variant (194)..(194): Xaa in position 194 is any amino acid
  Variant (202)..(210): Xaa in position 202 to 210 is any amino acid
  Variant (211)..(226): Xaa in position 211 to 226 is any or no amino acid
  Variant (228)..(250): Xaa in position 228 to 250 is any amino acid
  Variant (251)..(264): Xaa in position 251 to 264 is any or no amino acid
  Variant (266)..(266): Xaa in position 266 is any amino acid
  Variant (269)..(280): Xaa in position 269 to 280 is any amino acid
  Variant (281)..(299): Xaa in position 281 to 299 is any or no amino acid
  Variant (302)..(302): Xaa in position 302 is any amino acid
  Variant (305)..(305): Xaa in position 305 is any amino acid
  Variant (312)..(312): Xaa in position 312 is any amino acid
  Variant (314)..(315): Xaa in position 314 to 315 is any amino acid
  Variant (318)..(321): Xaa in position 318 to 321 is any amino acid
  Variant (322)..(323): Xaa in position 322 to 323 is any or no amino acid
  Variant (326)..(326): Xaa in position 326 is any amino acid
  Variant (331)..(331): Xaa in position 331 is any amino acid
  Variant (333)..(346): Xaa in position 333 to 346 is any amino acid
  Variant (347)..(354): Xaa in position 347 to 354 is any or no amino acid
  Variant (356)..(358): Xaa in position 356 to 358 is any amino acid
  Variant (359)..(376): Xaa in position 359 to 376 is any or no amino acid
  Variant (378)..(383): Xaa in position 378 to 383 is any amino acid
  Variant (384)..(416): Xaa in position 384 to 416 is any or no amino acid
  Variant (418)..(418): Xaa in position 418 is any amino acid
  Variant (420)..(420): Xaa in position 420 is any amino acid
  Variant (424)..(424): Xaa in position 424 is any amino acid
  Variant (426)..(427): Xaa in position 426 to 427 is any amino acid
  Variant (428)..(429): Xaa in position 428 to 429 is any or no amino acid
  Variant (431)..(432): Xaa in position 431 to 432 is any amino acid
  Variant (433)..(434): Xaa in position 433 to 434 is any or no amino acid
MCGGAIISDFIPXXXXXXXXRRXTXXXLWXXXXXXXXXXXXXXXXXXXXXXRXXXXXLDXXFEADFXXFXDXXXXXDXXXXXXXXXXXXXXXKPFXFXXXXXXXXXXXXXXXXXXXXXXXXXKXXXXXXXXXAEKXAKRKRKNQYRGIRQRPWGKWAAEIRDPRKGXRXWLGTFXTAEEAARAYDAXARRIRGXKAKVNFPXXXXXXXXXXXXXXXXXXXXXXXXXKXXXXXXXXXXXXXXXXXXXXXXXXXXXXXXXXXXXXXEXKPXXXXXXXXXXXXXXXXXXXXXXXXXXXXXXXYFXSDXGSNSFDXSXXGWXXXXXXTPXEISSXLXXXXXXXXXXXXXXXXXXXXXXKXXXXXXXXXXXXXXXXXXXXXLXXXXXXXXXXXXXXXXXXXXXXXXXXXXXXXXXXXXXXXNXMXLWSXDXXXXMXXXXV

SEQ ID NO: 808 - protein, 60 aa, Artificial sequence
  protein pattern
  Variant (25)..(25): Xaa in position 25 is Glu or Lys
  Variant (27)..(27): Xaa in position 27 is any amino acid
  Variant (29)..(29): Xaa in position 29 is any amino acid
  Variant (35)..(35): Xaa in position 35 is any amino acid
  Variant (36)..(36): Xaa in position 36 is Ser or Thr
  Variant (42)..(42): Xaa in position 42 is Lys or Arg
  Variant (46)..(46): Xaa in position 46 is Ala, Ile or Val
  Variant (47)..(47): Xaa in position 47 is Ala, Glu or Thr
  Variant (49)..(49): Xaa in position 49 is any amino acid
  Variant (54)..(54): Xaa in position 54 is any amino acid
  Variant (56)..(56): Xaa in position 56 is Ala or Ser
  Variant (58)..(58): Xaa in position 58 is Gly or Val
RKNQYRGIRQRPWGKWAAEIRDPRXGXRXWLGTFXXAEEAAXAYDXXAXRIRGXKXKXNF

SEQ ID NO: 809 - protein, 14 aa, Artificial sequence
  protein pattern
  Variant (10)..(11): Xaa in position 10 to 11 is any amino acid
  Variant (12)..(12): Xaa in position 12 is any or no amino acid
  Variant (14)..(14): Xaa in position 14 is Ala, Pro or Ser
MCGGAIISDXXXPX

SEQ ID NO: 810 - protein, 14 aa, Artificial sequence
  protein pattern
  Variant (2)..(2): Xaa in position 2 is any or no amino acid
  Variant (4)..(6): Xaa in position 4 to 6 is any or no amino acid
  Variant (9)..(9): Xaa in position 9 is Ser or Thr
  Variant (10)..(10): Xaa in position 10 is Phe, Ile or Leu
  Variant (11)..(11): Xaa in position 11 is Asp, Glu, Gly or Asn
  Variant (12)..(12): Xaa in position 12 is any amino acid
  Variant (14)..(14): Xaa in position 14 is Asp or Glu
FXSXXXSNXXXXSX

SEQ ID NO: 811 - protein, 21 aa, Artificial sequence
  protein pattern
  Variant (2)..(2): Xaa in position 2 is any amino acid
  Variant (4)..(5): Xaa in position 4 to 5 is any or no amino acid
  Variant (8)..(8): Xaa in position 8 is Ala or Leu
  Variant (9)..(9): Xaa in position 9 is Asp or Gly
  Variant (11)..(11): Xaa in position 11 is any amino acid
  Variant (12)..(12): Xaa in position 12 is Asp, Glu or Gly
  Variant (14)..(14): Xaa in position 14 is Glu or Lys
  Variant (16)..(19): Xaa in position 16 to 19 is any amino acid
  Variant (20)..(20): Xaa in position 20 is any or no amino acid
DXDXXFEXXFXXFXDXXXXXD

SEQ ID NO: 812 - protein, 11 aa, Artificial sequence
  protein pattern
  Variant (2)..(2): Xaa in position 2 is Ala, Gly, Asn or Ser
  Variant (3)..(3): Xaa in position 3 is Asp or Glu
  Variant (4)..(4): Xaa in position 4 is any amino acid
  Variant (5)..(5): Xaa in position 5 is Ala, Cys, Gly, Thr or Val
  Variant (6)..(6): Xaa in position 6 is Ala, Pro or Ser
  Variant (7)..(7): Xaa in position 7 is any amino acid
  Variant (10)..(10): Xaa in position 10 is Asp or Glu
WXXXXXXTPXI

SEQ ID NO: 813 - DNA, 1506 bp, Arabidopsis thaliana
  CDS (1)..(1506)
atgcttcttcaaaacttctccaacaccattttccttctctgcctcttcttcacactcctctccgccactaaacccctaaatctcactctccctcaccaacacccttcccctgattccgtcgctctccatgtcatcaggagtgtaaatgaatctcttgcaagaagacaactaagctcaccatcatcatcctcatcatcatcatcctcctcatcatcatcctcttgccgtaccggaaacccaatcgacgattgctggagatgcagcgacgcagactggtcaacaaaccgacaaagactagcagactgttcaatcggcttcggacacggcacactcggaggcaaaaacggcaagatctacgtcgtaactgactcatccgacaacaacccaacaaacccaacaccaggaacactccgttacggcgtaatccaagaagagccactctggatcgtcttctcttcaaacatgctcatcagactaaaacaagaactcatcatcaacagctacaaaaccttagatggtcgtggctcagccgttcacattaccggaaacggttgcttaactctccaatacgttcaacacatcatcatccacaacctccatatctatgactgtaaaccttcagctggattcgagaaacgtggtagatccgatggagatgggatctcgatcttcggatctcagaagatctgggttgatcattgttcaatgagtcattgcaccgacgggctaattgatgctgtgatgggttctacagctataactatatctaacaattacttcacccaccacgacgaggttatgttgttgggtcatgatgataactatgctcctgatacggggatgcaagtgacgatagcgtttaatcatttcggacaagggcttgttcagaggatgcctaggtgtcggagaggttacattcatgtagtgaataatgatttcactgagtggaaaatgtatgctattggtggtagtggtaatcccaccattaacagtcaaggaaatcgttactctgctccttctgatcctagcgccaaagaggtgacgaagcgagtggactcgaaggacgatggtgaatggtcgaattggaattggagaacagaaggggatttgatggagaatggagctttctttgtggcctctggtgaaggaatgagctcaatgtactctaaagcttctagtgttgaccctaaagctgcttctctcgtagaccagctcactcgaaacgctggcgtttttggcggtcccagggatgatcaaggtcagagtggcaattcttactctccttatggaggcgacggcggtggcggtgggagcagcggtgggagcagcggtggagggatggacgttatgggaggtacgacgagaggaagcagcagcagcagcggcgatgacagcaatgtcttccagatgatatttggaagcgatgcaccgtctcggccgcgtttaacgttattgttttctttgttaatgatttcggttttgtcgttatcaactctattattgtga

SEQ ID NO: 814 - protein, 501 aa, Arabidopsis thaliana
MLLQNFSNTIFLLCLFFTLLSATKPLNLTLPHQHPSPDSVALHVIRSVNESLARRQLSSPSSSSSSSSSSSSSSCRTGNPIDDCWRCSDADWSTNRQRLADCSIGFGHGTLGGKNGKIYVVTDSSDNNPTNPTPGTLRYGVIQEEPLWIVFSSNMLIRLKQELIINSYKTLDGRGSAVHITGNGCLTLQYVQHIIIHNLHIYDCKPSAGFEKRGRSDGDGISIFGSQKIWVDHCSMSHCTDGLIDAVMGSTAITISNNYFTHHDEVMLLGHDDNYAPDTGMQVTIAFNHFGQGLVQRMPRCRRGYIHVVNNDFTEWKMYAIGGSGNPTINSQGNRYSAPSDPSAKEVTKRVDSKDDGEWSNWNWRTEGDLMENGAFFVASGEGMSSMYSKASSVDPKAASLVDQLTRNAGVFGGPRDDQGQSGNSYSPYGGDGGGGGSSGGSSGGGMDVMGGTTRGSSSSSGDDSNVFQMIFGSDAPSRPRLTLLFSLLMISVLSLSTLLL

SEQ ID NO: 815 - DNA, 1224 bp, Brassica napus
  CDS (1)..(1224)
atgatacttcttcaccaattatctctctccctcttctcatgtctcttccttgtcctagctccgaccttcactgactccaaccatgtctccgaccctgaactcgtagttcaagaagtaaacgagaagattaatgcgtctaggaggaatcttggtgtcctctcatgtgggacaggaaaccctatcgacgattgttggagatgcgacccgaaatgggagaaaaaccgacaacgactagctgattgcgccattggatttggcaaacacgcaataggcggccgtgacggcaaaatatacgtggtgaccgaccctagcgacaaagacgtggttaaccctaaaccgggaaccctaagacacgcagtgatccaagacgagccgctatggatcatcttcgcacgtgacatggtcataaaactgaaagaagagctgctcatgaactcgttcaagaccattgacggccgtggagcgaacgtccacatcgccggtggcgcgtgcatcactgcccagtacgtgaccaacatcatcatccacggcatcaacatccacgactgcaagaagagagggaatgcttacgtcagagactctccgtcgcattacgggtggaggacggcatctgacggtgacgccgtctcgattttcggagggtcccacgtgtgggttgaccattgctcgttgtctaactgcgaggacggtctggtcgacccgatccgtggatctacggccattacgatctctaataactacttgacgcaccataacaaggtgatgcttttgggacacagtgattcgtacacgagagacaagaacatgcaagtcaccattgcctttaatcattttggtgaagggcttgttcagagaatgcccagatgtaggcatggatattttcatgtggtaaataatgattatacgcattggcaaatgtatgcaattggtgggagtgcagctccaacgattaacagtcaaggcaataggtttcttgctcccaatgaccatgtcttcaaagaggtgactaaatacgaagatgcaccacaaagcaaatggaagaagtggaactggagatcagaaggtgacttgttcctaaacggtgcgttttttacgccctcgggtggaagagcctcttcaagctatgcaaaagcttcaagtctgtcggctagaccatcctcgttggtggcttcagtcacgggcaatgctggtgctctctcttgtaagaaaggatctcgatgttaa

SEQ ID NO: 816 - protein, 407 aa, Brassica napus
MILLHQLSLSLFSCLFLVLAPTFTDSNHVSDPELVVQEVNEKINASRRNLGVLSCGTGNPIDDCWRCDPKWEKNRQRLADCAIGFGKHAIGGRDGKIYVVTDPSDKDVVNPKPGTLRHAVIQDEPLWIIFARDMVIKLKEELLMNSFKTIDGRGANVHIAGGACITAQYVTNIIIHGINIHDCKKRGNAYVRDSPSHYGWRTASDGDAVSIFGGSHVWVDHCSLSNCEDGLVDPIRGSTAITISNNYLTHHNKVMLLGHSDSYTRDKNMQVTIAFNHFGEGLVQRMPRCRHGYFHVVNNDYTHWQMYAIGGSAAPTINSQGNRFLAPNDHVFKEVTKYEDAPQSKWKKWNWRSEGDLFLNGAFFTPSGGRASSSYAKASSLSARPSSLVASVTGNAGALSCKKGSRC

SEQ ID NO: 817 - DNA, 1296 bp, Brassica napus
  CDS (1)..(1296)
atggcggctcttccgacatggattttagctatgatgtgtctactcttcttcgtcggagcaatagagaacagtacacacgacaagatatcatctctctccagatccaacgaaaatgaatggaacacgcatgcagtgacaaatccagatgaagtagcggacgaagttatcaccttggctgaaatgagtgtaagaaaccataccgagaggaggaagctaggttactttgcttgcggaacaggcaaccccatcgacgactgttggagatgcgatgccaactggcacaagaaccgcaaacgcctagcggactgtggaatcgggttcggaagaaacgcgatcggtggacgagacgggcgtttctacgtggtcaccgacccaaatgaccacgacccggttaaccctagaccgggaacactacgtcacgccgtgatccaagaccgaccgctatggatcgttttcaaacgcgacatggtgattcagctgaaacaagagctgatcgtcaacagcttcaaaacgatcgacggacgcggcgcaaacgttcacatcgctaacggcggttgcataacgattcagtacgtgacgaacgtcatagtccatggattgcatattcatgactgtagaccgaccggtaacgctatggtgagaagctcagagacgcactttgggtggaggacgatggcggatggtgacgcgatttcgatctttgaatcgagtcatgtttggattgatcacaactcgctgtctcattgcgctgatgggctagtggatgcagtcatgggctcgacggccattaccatctctaacaaccacatgactcatcacaacgaggttatgctgctcggacatagtgattcttacacgaaggataaagctatgcaagttaccattgcttataaccattttggtgtcggacttattcaaagaatgccaaggtgccgacacgggtatttccatgtcgtgaacaatgactacactcactgggaaatgtacgcgattggtggaagcgcaaacccgacaatcaacagtcaaggaaaccgctacgccgccccgaaaaatccctttgctaaagaggtgactaagagagtggacacaccggcgagtcattggaaaggatggaactggagaacggaaggagatttgcttcagaacggagcttacttcactgcttcaggagccgctgcatctggtagctacgcacgagcctctagcctcgcagctaaatcttcttcattggttgcaaccattactaacgacgctggagctctaccttgtcgtagaggacgtcaatgtacctcatag

SEQ ID NO: 818 - protein, 431 aa, Brassica napus
MAALPTWILAMMCLLFFVGAIENSTHDKISSLSRSNENEWNTHAVTNPDEVADEVITLAEMSVRNHTERRKLGYFACGTGNPIDDCWRCDANWHKNRKRLADCGIGFGRNAIGGRDGRFYVVTDPNDHDPVNPRPGTLRHAVIQDRPLWIVFKRDMVIQLKQELIVNSFKTIDGRGANVHIANGGCITIQYVTNVIVHGLHIHDCRPTGNAMVRSSETHFGWRTMADGDAISIFESSHVWIDHNSLSHCADGLVDAVMGSTAITISNNHMTHHNEVMLLGHSDSYTKDKAMQVTIAYNHFGVGLIQRMPRCRHGYFHVVNNDYTHWEMYAIGGSANPTINSQGNRYAAPKNPFAKEVTKRVDTPASHWKGWNWRTEGDLLQNGAYFTASGAAASGSYARASSLAAKSSSLVATITNDAGALPCRRGRQCTS

SEQ ID NO: 819 - DNA, 1296 bp, Brassica napus
  CDS (1)..(1296)
atggtggttcttccgacatggattttagctatgatatgtctactcttcttcgtgggagcaatggacaacagtacacacgacaagatctcatctctctccagatcggacgaaatcgaatggaacaagcatgcagtgacgaatccggatgaagtagctgacgaagttatcgccttggctgaaatgagtgtaagaaaccataccgagaggaggaagctaggttactttacttgcggaacaggcaacccaatcgacgattgttggcgatgcgatcgcaactggcacaagaaccgcaaacgcctagcggactgtggtatcggatttggaagaaacgcgatcggcggtcgcgacgggcgtttctacgtagtcactgacccaagagacgacaacccggttaaccctagaccggggacattacgtcacgccgtgatccaagaccgaccactatggatcgttttcaaacgtgacatggtgattcagttaaaacaagagctgatcgtaaacagcttcaaaacgatcgacggacgcggcgcaaacgttcacatcgctaacggcggttgcatcacgattcagtacgtgacgaacgtcatcgtgcatggattgcatattcatgactgtagaccgacgggtaacgctatggtgagaagctcagagacgcactttgggtggaggacgatggcggatggtgacgcgatttcgatctttggatcgagtcatgtttggattgatcacaactcgttgtctcattgcgctgatgggcttgtggatgcagtcatgggctcgacggccattaccatctctaacaaccacatgactcatcacaacgaggttatgttgctcggacatagtgattcttacacgagggataaagctatgcaagttactattgcttataaccattttggtgtcggacttattcaaagaatgccgaggtgtcgacacgggtatttccatgtcgtgaacaatgactacactcactgggaaatgtacgcgattggtggaagcgcaaacccgacaatcaacagtcaaggaaaccgctacgccgctcctaaaaatccttttgctaaagaggtgactaagagagtggacacaccggcgagtcattggaaaggatggaactggagatcggaaggagatttgcttcagaacggagcttacttcacttcttcaggagccgctgcatctggtagctacgcacgtgcctctagcctcgccgctaaatcttcttcattggttgcaaccattacttctgacgctggagctctaccttgtcgtagaggacgtcaatgtacctcatag

SEQ ID NO: 820 - protein, 431 aa, Brassica napus
MVVLPTWILAMICLLFFVGAMDNSTHDKISSLSRSDEIEWNKHAVTNPDEVADEVIALAEMSVRNHTERRKLGYFTCGTGNPIDDCWRCDRNWHKNRKRLADCGIGFGRNAIGGRDGRFYVVTDPRDDNPVNPRPGTLRHAVIQDRPLWIVFKRDMVIQLKQELIVNSFKTIDGRGANVHIANGGCITIQYVTNVIVHGLHIHDCRPTGNAMVRSSETHFGWRTMADGDAISIFGSSHVWIDHNSLSHCADGLVDAVMGSTAITISNNHMTHHNEVMLLGHSDSYTRDKAMQVTIAYNHFGVGLIQRMPRCRHGYFHVVNNDYTHWEMYAIGGSANPTINSQGNRYAAPKNPFAKEVTKRVDTPASHWKGWNWRSEGDLLQNGAYFTSSGAAASGSYARASSLAAKSSSLVATITSDAGALPCRRGRQCTS

SEQ ID NO: 821 - DNA, 1444 bp, Glycine max
  CDS (46)..(1260)
aattcggctcgagttcctctactaagaacaaagagaacagaaaaaatggctcccctttcatgcatcattgttctttttgctctttctcttctgacaccctgttttgtttcctcctccgcagtgagagaccctgagttagtagtacaagaagtacaaagaagcatcaatgcctctagaagaaacttgggttatttatcatgcggaacaggcaaccctattgacgattgctggcgttgtgaatccaactgggagaacaaccggcaaagactagctgattgtgcaattgggtttggcaaggacgcaataggaggaaaaaatggtcgaatctatgtggtcaccgactccggcgacgacgatgccgtgaaccctaggccaggaaccctaaggtacgcagccatacaagacgagccattgtggatcattttcaagagggacatggtgatcaccctaaaagaagagcttttggtgaattccttcaagacaattgatggaaggggtgctagtgttcacattgctaatgggggatgcattactatacactatgttagtaacattattatccatggtattcacattcatgattgcaagcccacggggaataccaatattagagactctccacatcactctgggttttggactcaatcagacggtgatggtgtgtccatctttaattcgaagcatatttgggttgatcattgctctttgtctaattgtcgtgatggtctcattgatgccattcatggatccacggccatcaccatctccaacaattacatgacccatcatgacaaggttatgcttttggggcacagtgattcgtacactcaagacaaggacatgcaggtcactatagcattcaatcattttggagaaggccttgtccaaagaatgccaaggtgtagacacgggtatttccatgtggtgaacaacgactacacccactgggaaatgtatgcaattggtgggagtgcaaaccctaccatcaacagccaagggaacaggttccttgccccaaacatcaggttcagcaaagaggtaaccaagcatgaggatgctccacagagtgagtggatggggtggaattggaggtcagagggtgacatgttcttgaatggagcatacttcaggcaatctggtgctggtgcctcttccagctatgctagggcttcaagtctcagtgcaagaccttcttctcttgttggctccatgaccaccactgctggtgcacttacctgtagaaagggcaaccgttgctgatgattgatgaattaatgatgatcactttaattattattagctaagaaatgaaatatatatacagctgcagggttgcaaaaagaaaaattaatatgtatgatttatatgaattaattcaccttatgcttaatttgcttcccttgcagtttactatatataatatatcattagccttttgctcttc

SEQ ID NO: 822 - protein, 404 aa, Glycine max
MAPLSCIIVLFALSLLTPCFVSSSAVRDPELVVQEVQRSINASRRNLGYLSCGTGNPIDDCWRCESNWENNRQRLADCAIGFGKDAIGGKNGRIYVVTDSGDDDAVNPRPGTLRYAAIQDEPLWIIFKRDMVITLKEELLVNSFKTIDGRGASVHIANGGCITIHYVSNIIIHGIHIHDCKPTGNTNIRDSPHHSGFWTQSDGDGVSIFNSKHIWVDHCSLSNCRDGLIDAIHGSTAITISNNYMTHHDKVMLLGHSDSYTQDKDMQVTIAFNHFGEGLVQRMPRCRHGYFHVVNNDYTHWEMYAIGGSANPTINSQGNRFLAPNIRFSKEVTKHEDAPQSEWMGWNWRSEGDMFLNGAYFRQSGAGASSSYARASSLSARPSSLVGSMTTTAGALTCRKGNRC

SEQ ID NO: 823 - DNA, 2380 bp, Glycine max
  CDS (128)..(1480)
cccctcgacgcgattccgcgggtctctctcccttctctctctctctcttctcttttcctcttcaacattcttctctctcacaaagcaacaacacaaacaccgagcgaggggaattcaactttcagcaatggcggtttcttcttctgcaacaaaatgggtcctcttcttgcttctggcgctgctcattcgagaagaagccatggccatggctactacaccacagatctctgacctcaggaatcttgaagttgaaagacacaggttgccgagcttgacgaactcgtcaatggtggagagggcaaaagaggctgacaaattaaatgaacaagctgctgtggctaacccagaggaagtggtttcaatggttgagatgagcatccagaacagcacagagaggaggaagttgggatatttctcttgtggaactggcaaccccattgatgattgctggcgttgcgaccccaactggcaacgcaatcggaagcgtcttgcggattgtggcattggttttggccgaaacgccatcggtggccgtgatggaaaattctatgtggtgactgaccccagggatgatgaccctgtgaacccgaaacccggcactcttcgccatgctgtgatccaggataggcccttgtggattgtgttcaagagggacatggttattcagctgaaacaagagctgatcatgaacagcttcaagacaattgatggtagaggagtcaatgtgcacattgctaatggagcatgcatcacaattcagtttgtaaccaatgttatcattcatggcttgcacattcatgattgcaaacctactggaaatgctatggtgagaagctccccaacacattttggttggaggacaatggctgatggagatgctatctccatatttggctcaagccacatttgggttgaccacaactccttgtcacactgtgcggatggccttgtggatgctgtcatgggctcaacagccattactatttccaacaaccacttcacccaccacaatgaggtgattctactaggccacagtgactcttacacaagagacaagctgatgcaagtgaccatcgcatacaaccatttcggagagggacttatccagagaatgccacgttgtagacatggatatttccacgtggtgaacaatgactacactcactgggagatgtatgctattggtggaagtgctaaccccaccatcaacagccagggcaacagatacaatgctcctactaacccttttgccaaggaggtgactaagagagtggaaacagcagaaacccaatggaagggttggaattggaggtcagagggagatttgttactgaatggggcctatttcactccatctggtgctggagcctcagccagctatgctagagcctctagcttaggagcaaaatcttcttccatggttgattccatgacttccaatgctggtgcactaggttgcaaaagaggccgtcagtgctagcatgtattatcaaccatagccatgtgaatgaaagaggccatccattatttttcttttgtgtttgattctcaagtttttaccatattatagtagaaaatcatcatcatcgtatccattgctttctttcctcacacctcgattaccatatcctgcatttttcttgacaagtgtacattaaattacacatgtcaatatggttttatgttgttaccccattgccacattgtgtgttttgttgttggtcaaccttagctgctcgacttgctccaactgaaacaagcaatgcaattgtaggagcaggtgcagaagtgtcatccattgttttcttcccttttcaatttttttcctttttcgttctttggtccttcccagctcatctcatctcatcaacctttgtcccccccccaccaattcatatgcatatttttccaaatgtcaaatcatgtctccttacatattgttcagtctttttcagttttataggatttgaattgaatgagcccaaatatatatatatatatatataaatatatatatgaattttcttttagccccattttgttatttttttactatttgttttgttgagttaattatacaagcaaaagcatgattgtcaaagttgagttatatggaaacactttatcaatgacgattatggaattgtaataaaaaaaaaaaaaaaaaaaaaaaaaaaaagctttttagccttttttttctttttgcccttgtcaatgcaagtaatctttgatttttttatgcaattatggttgtaaatcattaaacatatctgcttgtgtttgtttctcttaatcaaatataaaaaaaaaaaaagggcggccgccgccaagtcactgagctgtcggcattattccggccggtccggcaggggggcggcca

SEQ ID NO: 824 - protein, 450 aa, Glycine max
MAVSSSATKWVLFLLLALLIREEAMAMATTPQISDLRNLEVERHRLPSLTNSSMVERAKEADKLNEQAAVANPEEVVSMVEMSIQNSTERRKLGYFSCGTGNPIDDCWRCDPNWQRNRKRLADCGIGFGRNAIGGRDGKFYVVTDPRDDDPVNPKPGTLRHAVIQDRPLWIVFKRDMVIQLKQELIMNSFKTIDGRGVNVHIANGACITIQFVTNVIIHGLHIHDCKPTGNAMVRSSPTHFGWRTMADGDAISIFGSSHIWVDHNSLSHCADGLVDAVMGSTAITISNNHFTHHNEVILLGHSDSYTRDKLMQVTIAYNHFGEGLIQRMPRCRHGYFHVVNNDYTHWEMYAIGGSANPTINSQGNRYNAPTNPFAKEVTKRVETAETQWKGWNWRSEGDLLLNGAYFTPSGAGASASYARASSLGAKSSSMVDSMTSNAGALGCKRGRQC

SEQ ID NO: 825 - DNA, 1577 bp, Glycine max
  CDS (19)..(1326)
  misc_feature (982)..(982): n is a, g, c or t
cggctcgcgccaatagtcatggaaactagcaagttcagtttgctattcttttacgtaatttgtcttgctatattccctacccttaacgctaacataggtcacttcgatcatgtctggcataggcgattaaaagaagcaagagaagccgcaaaacaagcttacaagccgaaccccatgaaagttaccgctgagttcaatacacatgtcatcagggcaatgagaggctccaacaactcaagaaggggcttatcaaaccaatacgatggtccatgcaaggcgacaaaccccattgacaaatgttggagatgtgaccccaattgggagaaaaaccgcaagaggctagcagattgtgccctaggctttggccatggcacaacagggggcaaagatggcaaaatttacgtggttaacgactcttccgacaatgacctcgtaaaccctaaaccagggacattgagacatgctgcaattcaaagagagccactgtggatcatttttgatcgaaacatgaacattaaacttcacgcggagctcatgctaacggataataagaccatagatgcacgtggtgccaatgtgcacattagtgagggtgcccaaataacgttgcaatatgtgaaaaacatcatcattcacggtctgcacattcatgacattaagaaatgtagtggtggcctcatcagagactccatggatcactatggagtccgtgccatgagtgatggggatgccatttcggtgtttggatccacatatgtttggatagatcatgtttcctttaccaactgcgatgacggcctcatcgatgtcgttagcgcttcaactgctgttaccatctccaactgccatcttaccaaacataacgatgtattattatttggtgcgagtgatagctactcgggggataaaatcatgcaagtgactttggctttcaaccatttcgggaaaggattgattcagaggatgccaaggtgcagatggngcttctttcatattgttaacaatgactacacgcattggctaatgtacgccataggtggtagccaacaacccaccatcatcagccagggcaacgggtttatcgccccaaatgaccgaaatgccaaagaagtgacaaaaagggactatgcaccagaaagtgtgtggaagaactggaattggagatcagagggtgatttattgatgaatggagccttctttgttcagtctgggaaaaacgtagcaaaaaatcccaaggcagaaatcatagcaaagcctgggaaagccgtatcgagtctcactcgctttgcaggtcctctaaaatgtgaagtaaacaagtcgtgttgaaccaaataaagagcttcgtttgtggttgtaacataaataagtcgtgtacatatcaaacccgaagtgaatgcttccgtggttttttaattccttttcctcgctttgttcttccttttcccttggattatatgatttgagggatctgaggcaaagaaaatagtagaactaagatgtactcccactgtctttaattataagacttaatttattaatttaacatttattaaaaaaaaaaaaaaaaaaaaaaatag

SEQ ID NO: 826 - protein, 435 aa, Glycine max
  misc_feature (322)..(322): The Xaa at location 322 stands for Arg, Cys, Gly, or Ser.
METSKFSLLFFYVICLAIFPTLNANIGHFDHVWHRRLKEAREAAKQAYKPNPMKVTAEFNTHVIRAMRGSNNSRRGLSNQYDGPCKATNPIDKCWRCDPNWEKNRKRLADCALGFGHGTTGGKDGKIYVVNDSSDNDLVNPKPGTLRHAAIQREPLWIIFDRNMNIKLHAELMLTDNKTIDARGANVHISEGAQITLQYVKNIIIHGLHIHDIKKCSGGLIRDSMDHYGVRAMSDGDAISVFGSTYVWIDHVSFTNCDDGLIDVVSASTAVTISNCHLTKHNDVLLFGASDSYSGDKIMQVTLAFNHFGKGLIQRMPRCRWXFFHIVNNDYTHWLMYAIGGSQQPTIISQGNGFIAPNDRNAKEVTKRDYAPESVWKNWNWRSEGDLLMNGAFFVQSGKNVAKNPKAEIIAKPGKAVSSLTRFAGPLKCEVNKSC

SEQ ID NO: 827 - DNA, 1847 bp, Zea mays
  CDS (73)..(1272)
gctcctctcttcctttctctctcgccgcaggcgggcagttcgagagggcgtgcgttgctcgaggggcggtaaatggcagcggcgacgacgaggggcagggccgacggtgacgccggcgccggcgcggtggtagatccggaagccgtggccaacgacgtccacgcgtccatcaacaacatcacggcccggcgaaatctcgggtacctgtcgtgcgggacaggcaaccccatcgacgactgctggcgctgcgactcggactggcacaacaaccggaagcgcctcgccgactgtggcacggccggggtgggcaagccggagtggttatcggacggcaaggtgtacgtggtgaccgacccgagcgacgacgaccccgtgaacccgcgcgagggcaccctccgccacgccgtcatccaggaggagccgctgtggatcatcttcaagcgggacatggtgatcacgctcagggaggagctcatcatgaacagcttcaagaccatcgacggacgcggcgccaacgtgcacatcgccaatggtgcctgcatcaccatccagtacatcaccaacgtcatcatccacgggctccacatccacgactgcaggcccacggggaacgccatggtgcgcagctccccgagccactacggctggcgcaccatggccgacggggacggcgtgtccatcttcggttccagccacgtctgggtggaccactgctcgctctccaactgcgccgacggcctcatcgacgccatcatgggatccacggccatcactctgtccaacaactacttcacccaccacaacgaggtgatgctcctgggccacagtgactcctatgtgaaggacaaggcgatgcaggtcacgatagccttcaaccatttcggcgaaggcctcattcagagaatgccaaggtgccggcacggctacttccacgttgtgaacaacgactacacccactgggagatgtacgccattgggggcagcgcggagccaaccatcaacagccagggcaaccgctaccttgctccgacgaacccgttcgccaaggaggtgaccaagagggtggagactgcccagaccgtgtggaagagctggaactggaggtcagagggcgacctgctgctgaacggcgcctacttcaccccgtccggcgcgggcgcctcggccagctactcgcgcgcgtccagcctcggcgccaagtcgtcgtccatggtcggcaccatcacctcggacgccggcgcactgtcgtgccgcaagggcgcggcctgctagcgcggatcgcgctccctctccagcaacaggaaaagaaacaggacaacaggaaactaagccacctcaacaccaccaccaccatggttacagtttcttcttcccttctttttaggggtcgcttttgacaagggttatattatatatatatatgatggtcctccttgatattttcaccatttgctcaacctcccccctgctcccgacatggaaagctacctggagcagcaggcgtgaagcgttgctgattggtcgctcggtctctctattagtcgtctgatctgagtgttgcgtgttgttccctctgcctacaagcaagtggtgtatgttgagggcagggggtgcgtgcgtgcgtgttgtgtgtgatacttactcacttggttgttgtgttgagaaaaaaagggtcagattgttagtagtggtagtactacatgttacgcctggacagactgggatggaatggatgtacaagacatggaggaatacccatgttcttaactcttcttcttcttcagtgaaaaaagctaaaacgttacagtttagctgaatattttgatctaaaaaaaaaaaaaaaaaaa

SEQ ID NO: 828 - protein, 399 aa, Zea mays
MAAATTRGRADGDAGAGAVVDPEAVANDVHASINNITARRNLGYLSCGTGNPIDDCWRCDSDWHNNRKRLADCGTAGVGKPEWLSDGKVYVVTDPSDDDPVNPREGTLRHAVIQEEPLWIIFKRDMVITLREELIMNSFKTIDGRGANVHIANGACITIQYITNVIIHGLHIHDCRPTGNAMVRSSPSHYGWRTMADGDGVSIFGSSHVWVDHCSLSNCADGLIDAIMGSTAITLSNNYFTHHNEVMLLGHSDSYVKDKAMQVTIAFNHFGEGLIQRMPRCRHGYFHVVNNDYTHWEMYAIGGSAEPTINSQGNRYLAPTNPFAKEVTKRVETAQTVWKSWNWRSEGDLLLNGAYFTPSGAGASASYSRASSLGAKSSSMVGTITSDAGALSCRKGAAC

SEQ ID NO: 829 - DNA, 1401 bp, Zea mays
  CDS (1)..(1401)
atggcagcggcgggctcgtccgcggcgagggccaggagggcggggctcgcagccgccgccgccgcggcgctcctcgtcctcgtggtggtcgccgtcagcgcggcgctccctggcgggcgggtgagggtcctcgacggccttcggcaaaggagcacgtccgtggtggcgggaggcgcgaggcggtggctgcgggactcctccttgccggcggcgacgacgaggggcagggccgacggtgacgccggcgccggcgcggtggaggatccggaagccgtggccaacgacgtccacgcgtccatcaacaacatcacggcccggcgaaatctcgggtacctgtcgtgcgggacaggcaaccccatcgacgactgctggcgctgcgactcggactggcacaacaaccggaagcgcctcgccgactgtggcatcggctttggccgcaacgccatcggcggccgtgacggcaagatctacgtggtcaccgacccgagcgatgacgaccctgtcaacccgcgcaagggcaccctccgctacgccgtcatccaggaagagccgctctggatcatcttcaagcgggacatggtcatcacgctcaaggaggagctcatcatgaacagcttcaagaccatcgacggacgcggcgccaacgtgcacatcgccaatggtgcctgcatcaccatccagtacatcaccaacgtcatcatccacgggctccacatccacgactgcaagcccacggggaacgccatggtgcgcagctcgcccagccactatgggtggcgcaccatggccgacggagatggtgtgtccatcttcggttccagccacgtctgggtggaccactgctcgctctccaactgcgccgacggcctgatcgatgctatcatgggatccacggctatcacagtgtccaacaactacttcacccaccacaacgaggtgatgctcctgggccacagtgactcctatgtgaaggacaaggcaatgcaggtgacgatagccttcaaccatttcggtgaaggtctcatccagagaatgccaaggtgccggcatggctacttccatgttgtgaacaacgactacacccactgggaaatgtacgccattggcgggagcgctgagccaaccatcaacagccagggcaaccgctaccttgctcccacaaacccgttcgccaaggaggtgaccaagagggtcgaaactgctcacactgtctggaagaggtggaactggagatcagagggtgacctcctgctgaacggcgcctacttcaccccctccggcgcgggcgcctcagccagctactcgcgcgcgtccagccttggcgccaagtcatcatctatggtcggcaccatcaccctggatgccggtgccctgtcgtgccacaagggcgcgccctgctag

SEQ ID NO: 830 - protein, 466 aa, Zea mays
MAAAGSSAARARRAGLAAAAAAALLVLVVVAVSAALPGGRVRVLDGLRQRSTSVVAGGARRWLRDSSLPAATTRGRADGDAGAGAVEDPEAVANDVHASINNITARRNLGYLSCGTGNPIDDCWRCDSDWHNNRKRLADCGIGFGRNAIGGRDGKIYVVTDPSDDDPVNPRKGTLRYAVIQEEPLWIIFKRDMVITLKEELIMNSFKTIDGRGANVHIANGACITIQYITNVIIHGLHIHDCKPTGNAMVRSSPSHYGWRTMADGDGVSIFGSSHVWVDHCSLSNCADGLIDAIMGSTAITVSNNYFTHHNEVMLLGHSDSYVKDKAMQVTIAFNHFGEGLIQRMPRCRHGYFHVVNNDYTHWEMYAIGGSAEPTINSQGNRYLAPTNPFAKEVTKRVETAHTVWKRWNWRSEGDLLLNGAYFTPSGAGASASYSRASSLGAKSSSMVGTITLDAGALSCHKGAPC

SEQ ID NO: 831 - DNA, 1440 bp, Zinnia elegans
  CDS (28)..(1233)
gcacgagaccaccatcacctctaaaaaatggcaaccacaattctaccactaatcctctttatatcttcactagccattgcttcttcatcaccaagtagaaccccacatgccatagtcaatgaagtccacaagagcatcaatgcttcccgtagaaacttgggttacctgtcttgtgggacaggtaacccaattgatgattgctggcggtgtgaccctaactgggccaataaccgccagcgtcttgctgactgtgccattgggtttggaaagaacgcgatgggtgggcgaaatggaaggatatatgttgtcactgatcccgggaatgatgatccagtgaaccctgttcccgggaccctgagatatgcggttattcaagatgaaccgttgtggatcatctttaaacgcgacatggtaattcaactacggcaagaacttgtgatgaattctcacaagaccatagatggtaggggtgtgaatgtgcatattggtaatggcccatgcattactatacattatgctagtaatattattatacatggtattcatatacatgattgtaagcaggctggtaatggtaacattagaaactcaccacatcatagtggatggtggacacaatctgatggtgatgggatatccatttttgctagcaaagatatatggattgatcataattctttgtctaattgtcatgatgggctcattgatgccatacatggatctactgccatcactatttctaacaattacatgactcatcatgataaagttatgttgttaggacatagtgatagttatactcaagataagaacatgcaagttactattgcatttaaccattttggtgaaggtcttgttcaaagaatgccaagatgtagacatgggtatttccatgtggtgaacaatgactatacacattgggagatgtatgctattggaggaagtgcatctcctaccatctatagccaaggcaatagatttttggctcccaatacaagatttgacaaggaggtgacaaaacatgagaatgcacccgaaagtgaatggaagaactggaattggagatcagaaggagatttgatgttaaacggtgcttattttagagaatcaggtggacgtgctgcttcatcttttgcaagggcgtcgagtttgagtggcagaccatctacacttgtggcgtcaatgactcgatcagccggagcgctcgtttgccgaaaagggtctcgttgttgattatggactagagacatatataaagttattgcattttgtgtttctttcttgtatttctatgtttttgttacttgcttttactaatatgtcatgtcaacctttgtgcttggttggatatgaatcaagatgagtctttcatatggaccaacaaattaaatgcaaaagagttgaccaaatgaatatttatatattatatttaatttctct

SEQ ID NO: 832 - protein, 401 aa, Zinnia elegans
MATTILPLILFISSLAIASSSPSRTPHAIVNEVHKSINASRRNLGYLSCGTGNPIDDCWRCDPNWANNRQRLADCAIGFGKNAMGGRNGRIYVVTDPGNDDPVNPVPGTLRYAVIQDEPLWIIFKRDMVIQLRQELVMNSHKTIDGRGVNVHIGNGPCITIHYASNIIIHGIHIHDCKQAGNGNIRNSPHHSGWWTQSDGDGISIFASKDIWIDHNSLSNCHDGLIDAIHGSTAITISNNYMTHHDKVMLLGHSDSYTQDKNMQVTIAFNHFGEGLVQRMPRCRHGYFHVVNNDYTHWEMYAIGGSASPTIYSQGNRFLAPNTRFDKEVTKHENAPESEWKNWNWRSEGDLMLNGAYFRESGGRAASSFARASSLSGRPSTLVASMTRSAGALVCRKGSRC

SEQ ID NO: 833 - DNA, 1347 bp, Glycine max
  CDS (1)..(1347)
atggcggtttcttcttcttctgcaacaaaatgggtcgtcttcttgcttctggcgctgcttattcgagaagaagctatggctacaccacagatctctgacctcaggaatcttgaagttgaaagacacaggttgccgagcttgacgaactcgtcaatggcggagagggcaaaagaggctgacaaattaaatgaacaagctgctgtggctaacccagaggaagtggtttcaatggttgagatgagcatccaaaacagcacagagaggaggaagttgggatttttctcttgtggaactggcaaccccattgatgattgctggcgttgcgaccccaactggcaacgcaatcggaagcgtcttgcagattgtggcattggttttggccgaaacgccatcggtggccgtgatggaaaattctatgtggtgactgaccccagggatgatgaccctgtgaacccgaaacccggcactcttcgccatgctgtgatccaggataagccattgtggattgtgttcaagagggacatggttattcagctgaaacaagagctgatcatgaacagcttcaagacaattgatggtagaggagtcaatgtgcacattgctaatggagcatgcatcacaattcagtttgtaaccaatgttatcattcatggcttgcacattcatgattgcaaacctactggaaatgctatggtgagaagctccccaacacattttggttggaggacaatggctgatggagatgctatctccatatttggctcaagccacatttgggttgaccacaactccttgtcacactgtgcggatggccttgtggatgctgtcatgggctcaacagccattactatttccaacaaccacttcacccaccacaatgaggtgattctactaggccacagtgactcttacacaagagacaagctgatgcaagtgaccatcgcatacaaccatttcggagagggacttatccagagaatgccacgttgtagacatggatatttccacgtggtgaacaatgactacactcactgggagatgtatgctattggtggaagtgctaaccccaccatcaacagccagggcaacagatacaatgctcctactaacccttttgccaaggaggtgactaagagagtggaaacagcagaaacccaatggaagggttggaattggaggtcagagggagatttgttactgaatggggcctatttcactccatctggtgctggagcctcagccagctatgctagagcctctagcttaggagcaaaatcttcttccatggttgattccatgacttccaatgctggtgcactaggttgcaaaagaggccgtcagtgctag

SEQ ID NO: 834 - protein, 448 aa, Glycine max
MAVSSSSATKWVVFLLLALLIREEAMATPQISDLRNLEVERHRLPSLTNSSMAERAKEADKLNEQAAVANPEEVVSMVEMSIQNSTERRKLGFFSCGTGNPIDDCWRCDPNWQRNRKRLADCGIGFGRNAIGGRDGKFYVVTDPRDDDPVNPKPGTLRHAVIQDKPLWIVFKRDMVIQLKQELIMNSFKTIDGRGVNVHIANGACITIQFVTNVIIHGLHIHDCKPTGNAMVRSSPTHFGWRTMADGDAISIFGSSHIWVDHNSLSHCADGLVDAVMGSTAITISNNHFTHHNEVILLGHSDSYTRDKLMQVTIAYNHFGEGLIQRMPRCRHGYFHVVNNDYTHWEMYAIGGSANPTINSQGNRYNAPTNPFAKEVTKRVETAETQWKGWNWRSEGDLLLNGAYFTPSGAGASASYARASSLGAKSSSMVDSMTSNAGALGCKRGRQC

SEQ ID NO: 835 - DNA, 1356 bp, Glycine max
  CDS (1)..(1356)
atgaagctgctctctccaaaattgttcactctcgccattctgctcgcggcggcgctggttttagcttccgccgacgcagtcagtgacaatgagatgcagaaacatgaagccacggaatcaagggacgtggttgaagagaagttgcgagtgcagagcttgaagaattcgtcaatggcagaaaggtcagggggtgctttaaatgaacatgcagttgataatccagaggagattgcttccatggttgatgagagcatacgcaattacacagctcgaaggaacctgaacttcttctcatgcgggaccgggaacccaatcgacgactgctggcggtgcgacaagcggtggtacgcccgccgcaagcgcctagccaactgcggcatcggcttcggccgcaacgccatcggcggccgcgacgggcgctactacgtcgtgtcggaccccaacgacgacgacccagtaaaccccaaacccggcaccctccggcacgccgtgatccaggaccgccccctctggatcgtgttcaagcgcgacatggtcataaccctaaagcaagaactcatcatgaacagcttcaagaccatcgacggccgcggcgtgaacgtccacatcgcttatggtgcgtgcatcaccatacagttcgtcaccaacgtgatcatccatgggttgcatattcatgactgcaaggtgactgggaacgccatggttcggagctctccttcgcattatggttggaggacccttgctgatggagatgggatctccatctttggctcgagtcatatttggattgatcataactcgctgtcgaattgcgctgatgggcttgtggatgctgttatggggtccactgctattactatttccaacaactacttcacccaccacaacgaggttatgctactgggtcacagtgactcttatgtccgcgacaagcaaatgcaagtaaccattgcttacaaccattttggggagggacttatccaaagaatgcccaggtgcagacatgggtatttccacgtggttaacaacgactatacccactgggtaatgtatgcaattggaggcagtgctaaccccacaattaatagccagggcaacagatacctcgcccctctgaacccttttgctaaagaggtgacaaagagagtggatacagggtcatccgtatggaaaagttggaattggagatctgaaggagaccttttgctcaatggagccttttttacttcatcaggagcaggagctgcagcaagctatgccagagcctcaagtttgggggcaaaatcatcttctttggttggtaccatcacatctggagctggtgttcttaaatgccgcaggggtgtcatgtgttaa

SEQ ID NO: 836 - protein, 451 aa, Glycine max
MKLLSPKLFTLAILLAAALVLASADAVSDNEMQKHEATESRDVVEEKLRVQSLKNSSMAERSGGALNEHAVDNPEEIASMVDESIRNYTARRNLNFFSCGTGNPIDDCWRCDKRWYARRKRLANCGIGFGRNAIGGRDGRYYVVSDPNDDDPVNPKPGTLRHAVIQDRPLWIVFKRDMVITLKQELIMNSFKTIDGRGVNVHIAYGACITIQFVTNVIIHGLHIHDCKVTGNAMVRSSPSHYGWRTLADGDGISIFGSSHIWIDHNSLSNCADGLVDAVMGSTAITISNNYFTHHNEVMLLGHSDSYVRDKQMQVTIAYNHFGEGLIQRMPRCRHGYFHVVNNDYTHWVMYAIGGSANPTINSQGNRYLAPLNPFAKEVTKRVDTGSSVWKSWNWRSEGDLLLNGAFFTSSGAGAAASYARASSLGAKSSSLVGTITSGAGVLKCRRGVMC

SEQ ID NO: 837 - DNA, 1434 bp, Glycine max
  CDS (1)..(1434)
atgctccaaacaacctgcattatactcttctctgttgtggccatatttttgcctcatggaacagcaatgctcaacctcactctcccaggacaacacccagaccctgaagccgttgctcgagaagttcataggaaagtgaatgcttcaatggcaagaagggaaatgctgggagtgtcagagaaagaggtggcatcatgtctaacagggaatcccatagatgattgttggaaatgtgacccagattgggccaacaacaggcagaggctagcagattgtgcaatagggttcgggcagaacgcaaagggaggaaaaggtggccaattttacatagtcactgattcctcagatgaggaccctgtgaacccaaaacctggaacacttagatatgcagtgatacagaacgagccactgtggatagtgttccccagtaacatgatgattaagctgtctcaagaactcatttttaatagctacaagaccattgatgggcgtggagctgacgtgcacattgtgggtggaggctgcattactcttcagtatattagcaatgtcattattcacaacattcacatccaccattgccatccctctggcaacgctaacgtgcggtcgagccccgaacattatgggtaccgcacggagtcggacggcgacgggatctccatcttcggctcgcgtgacatttggatcgaccactgcaccctctcccggtgcaaggacggcctgatcgatgcagtgatgggttccagcgctatcacgatctccaacaaccacttctcccaccacaatgacgtgatgctcctgtgccacagcgaccactacctcccagactccagcatgcaggtgaccattggcttcaaccactttcgggagggcctcgtccagcgcatgccgcgttgccgacgaggttacattcacgtggagaacaatgacttcacacgatgggagatgtacgccatcggcggcagtgcgggacccaccattaacagccagggaaaccgctacaccgcgccggaggatccgtacgcgaagcaggttacgaagaggctggatgccgaaaaaggggagtggagcgggtggaattggcggtccgaaggggatgttttgttgaatggcgcgttcttcgttgcttcgggagcagttgctgaacctaactatcagaacgcctacagcacccaacctaagaacgtggatcgcatttcgcttctcactatgtccgccggtgttctcggcgttgctagggacaataatctgggaatgtggatcagaggacccaacgatggcactgtatatttttcagattctggcccagaatacacagacgaaatgtcccggagtacaatgccgttgctaccttcacgtattttgattcttgtatctgcactcttatgcttcttaggtcatacaacaaccttaacaacactacccaattag

SEQ ID NO: 838 - protein, 477 aa, Glycine max
MLQTTCIILFSVVAIFLPHGTAMLNLTLPGQHPDPEAVAREVHRKVNASMARREMLGVSEKEVASCLTGNPIDDCWKCDPDWANNRQRLADCAIGFGQNAKGGKGGQFYIVTDSSDEDPVNPKPGTLRYAVIQNEPLWIVFPSNMMIKLSQELIFNSYKTIDGRGADVHIVGGGCITLQYISNVIIHNIHIHHCHPSGNANVRSSPEHYGYRTESDGDGISIFGSRDIWIDHCTLSRCKDGLIDAVMGSSAITISNNHFSHHNDVMLLCHSDHYLPDSSMQVTIGFNHFREGLVQRMPRCRRGYIHVENNDFTRWEMYAIGGSAGPTINSQGNRYTAPEDPYAKQVTKRLDAEKGEWSGWNWRSEGDVLLNGAFFVASGAVAEPNYQNAYSTQPKNVDRISLLTMSAGVLGVARDNNLGMWIRGPNDGTVYFSDSGPEYTDEMSRSTMPLLPSRILILVSALLCFLGHTTTLTTLPN

SEQ ID NO: 839 - DNA, 1227 bp, Glycine max
  CDS (1)..(1227)
atgacaagcactcttctgtctttgctcttcttgctcttctctcttctcactccaactctaatttcctcttcaccagttctaaaccctcaagaggtcgtacaagaggtcaacaagaaaatcaatggctctatagcaagacccagaaggaacttgggctacctctcatgtggtagtggcaaccccatcgatgattgttggaggtgtgaccccaactgggagcagaacaggcagaggctagcagactgcgcaatcgggttcggcaagaacgccattggcggcagagacggcaagatctatgtggtggaggacgacggcgacgacgacgcggtgaacccgaagccgggaaccctccggcacgccgtgatccaagacgagcccttatggataatcttcgccagagacatggtgatccaacttaaagaagagcttctcatgaactccttcaagaccatcgacggaagaggtgccagcgtgcacgttgctgggggtccatgcataacgatacagtacgtgaccaacgtcatcatccatgggattcacatacacgattgcaagcagggagggaacgctatggtgcgggactccccacggcactacggctggagaaccgtatcggacggtgacggcgtgtccatcttcggagggagccacgtgtgggttgaccattgctcgctgtctaactgcaacgacgggttgatcgacgccatccatggctccaccgctattaccatttctaataactacatgacccatcatgataaggtcatgttgttgggtcacagcgattcttacacccaggacaaggacatgcaagtcactattgctttcaaccactttggtgaaggccttgttcaaaggatgccaaggtgtaggcttgggtatttccatgtggtgaacaatgattatactcactgggaaatgtatgccattggtggaagtgctaatccaaccatcaactgccaaggcaacagatttgttgcacccgatgacagattcagcaaagaggtgacaaagcatgaggatgcaccagagagtgaatggaaaggatggaattggaggtcagaaggggacttgttggtaaacggtgcgtttttcacggcatcgggggctggagcctcctctagctatgcaagagcatctagcttgagtgcaaggccatcttcattggtggggtccataaccactggtgcgggtgcactcagctgtaggaagggttcccgctgctga

SEQ ID NO: 840 - protein, 408 aa, Glycine max
MTSTLLSLLFLLFSLLTPTLISSSPVLNPQEVVQEVNKKINGSIARPRRNLGYLSCGSGNPIDDCWRCDPNWEQNRQRLADCAIGFGKNAIGGRDGKIYVVEDDGDDDAVNPKPGTLRHAVIQDEPLWIIFARDMVIQLKEELLMNSFKTIDGRGASVHVAGGPCITIQYVTNVIIHGIHIHDCKQGGNAMVRDSPRHYGWRTVSDGDGVSIFGGSHVWVDHCSLSNCNDGLIDAIHGSTAITISNNYMTHHDKVMLLGHSDSYTQDKDMQVTIAFNHFGEGLVQRMPRCRLGYFHVVNNDYTHWEMYAIGGSANPTINCQGNRFVAPDDRFSKEVTKHEDAPESEWKGWNWRSEGDLLVNGAFFTASGAGASSSYARASSLSARPSSLVGSITTGAGALSCRKGSRC

SEQ ID NO: 841 - DNA, 1110 bp, Fragaria ananassa
  CDS (1)..(1110)
atgagtatccgcaacagcactgaaaggagaaagctgggctacttctcatgtggaactggaaatcccattgatgattgctggcgttgtgatcccaactggcaaaagaaccgcaagcgtcttgcagactgtggaattggttttggcagaaatgccattggtggtcgtgatggacgcttctatgttgtcactgatcctaatgatgatgatcccgttaaccccagacccggcactctgcgccatgctgtcatccaggatgagcctctctggattgtgttcaaacgtgacatggtgatccaattgaagcaggagcttatcatgaatagcttcaagaccattgatggccgtggagtcaatgtccacattgctaatggagcatgcattacaatccagtttgttacaaatgttatagttcatggtctgcatatccatgactgcaagcccacaggaaatgctatggtgaggagctccccatctcactttggatggaggacaatggctgatggtgatgctatctccatcttcgggtcaagccatatctgggttgatcacaattccctctccaattgtgctgatggtcttgttgatgctgtcatggggtcaactgctattaccatctccaacaaccacctaacccaccacaatgaagtaatgctgttgggccacagcgattcttataccagggacaagcaaatgcaagtgactattgcctacaaccactttggagagggacttatccagagaatgccaaggtgcagacatggatatttccatgtggtgaacaacgactacactcactgggaaatgtatgccatcggtggaagtgcagaccccactatcaacagccaaggcaacagatatgcagctccaaccaacccctttgcaaaggaggttaccaagagagtggagacatcgcaaactcagtggaggggctggaactggaggtcagaaggtgatcttctactcaatggtgccttcttcactccatctggagctggagcttcagctgtctatgccagggcctcaagcttgggagccaagtcatctgccatggtgggaaccataactgctagtgctggtgcacttggatgccgcagaggacgtacctgctag

SEQ ID NO: 842 - protein, 369 aa, Fragaria ananassa
MSIRNSTERRKLGYFSCGTGNPIDDCWRCDPNWQKNRKRLADCGIGFGRNAIGGRDGRFYVVTDPNDDDPVNPRPGTLRHAVIQDEPLWIVFKRDMVIQLKQELIMNSFKTIDGRGVNVHIANGACITIQFVTNVIVHGLHIHDCKPTGNAMVRSSPSHFGWRTMADGDAISIFGSSHIWVDHNSLSNCADGLVDAVMGSTAITISNNHLTHHNEVMLLGHSDSYTRDKQMQVTIAYNHFGEGLIQRMPRCRHGYFHVVNNDYTHWEMYAIGGSADPTINSQGNRYAAPTNPFAKEVTKRVETSQTQWRGWNWRSEGDLLLNGAFFTPSGAGASAVYARASSLGAKSSAMVGTITASAGALGCRRGRTC

SEQ ID NO: 843 - DNA, 1200 bp, Musa acuminata
  CDS (1)..(1200)
atggcagccttcactgcccccatctactcttctcgtgcacccttaacgtcggcagctgtccgcgaccctgaattagtagtacaggaagtacaaagaagcttgaacgtgtcgcggcggcgactgggctacttgtcatgcggcaccggcaatccgatcgacgactgctggcggtgcgaccctgactgggctgacaaccggcagcggctcgcggactgcgccatcgggttcgggaagaacgcgattgggggcagggacggcgagatatacgtggtgaccgacagtggcgacgacgaccccgtcaatccgaagccgggcacgctccggtacgccgtcatccaggaggagccgctgtggatcatcttcaagcgcgacattgtcatccagctgaaggaggagctcatcatgaactcccacaagaccatcgacggccggggcgccagcgtccacatctccggcgggccgtgcatcaccatccagtacgtcaccaacatcatcatccacggcgtccacatccacgactgcaagcagggcgggaacgcgtacgtgcgcgactccccagggcactacgggtggcgcacggtgtcggacggcgacggggtgtccatcttcggcgggcagccaccgtcttgggtcgaccactgcacgctgttcaactgccacgacgggctcattgacgcaattcatgggtccaccgcgatcaccatttccaacaactacttgaggcaccatgacaaggtcatgctgctgggtcacagcgacgagttgacgtccgacaagagcatgcaggtcaccatagccttcaaccacttcggggaagacctggttcagaggatgccaaggtgtcggcatggctatttccacgtggtgaacaatgactacacccactgggagatgtacgcaattggtgggagtgctgctcccactataaacagccaaggcaacagatttcttgcgcccaatgatcggtttgcaaaagaggtgactaaacgcgaggacgcacaggagagcgagtggaagaagtggaactggaggtcggaaggggaccagatgctgaatggagccttcttcacgccgtccggggccggagcttcgtcgagtcacgcgaaggcgtcgagcttggggcccaggtcgtcgtctctcgtcgggaccatcaccgtctctgccggcgttctctcgtgcaagaagggatcccgctgttga

SEQ ID NO: 844 - protein, 399 aa, Musa acuminata
MAAFTAPIYSSRAPLTSAAVRDPELVVQEVQRSLNVSRRRLGYLSCGTGNPIDDCWRCDPDWADNRQRLADCAIGFGKNAIGGRDGEIYVVTDSGDDDPVNPKPGTLRYAVIQEEPLWIIFKRDIVIQLKEELIMNSHKTIDGRGASVHISGGPCITIQYVTNIIIHGVHIHDCKQGGNAYVRDSPGHYGWRTVSDGDGVSIFGGQPPSWVDHCTLFNCHDGLIDAIHGSTAITISNNYLRHHDKVMLLGHSDELTSDKSMQVTIAFNHFGEDLVQRMPRCRHGYFHVVNNDYTHWEMYAIGGSAAPTINSQGNRFLAPNDRFAKEVTKREDAQESEWKKWNWRSEGDQMLNGAFFTPSGAGASSSHAKASSLGPRSSSLVGTITVSAGVLSCKKGSRC

SEQ ID NO: 845 - DNA, 1239 bp, Arabidopsis thaliana
  CDS (1)..(1239)
atggtttcgtattctaataatcattttgcatacgcatttctacttcttctaacaatcggtaacacgcttgcattttcttcgagtttgccggatcatgttcaagatccaaatctagtcgttgacgacgttaacagaagtgtattcaatgcgtcaaggaggagcttggcctacctatcttgtagaaccggaaatcctattgacgattgttggcggtgtgaccctaattgggaaacaaaccgccaacggttagcagattgtgccattggatttggcaaaaatgctatcggagggcgcaaaggtcgaatctatgtagttacggatcctgccaacgacgatcccgtaaaccctagacctgggactctaagatatgcagtgacacaagaagaaccattatggatcattttcaagagagatatggtcattaggctcaaaaaagaacttatcatcacatctttcaagaccattgatggtagaggctcgagtgttcacattaccgatggaccatgcttaaagatccactatgcaactaacatcataattcatggcattaacatccatgactgtaaaccaggatcaggtggcatgattaaagatggtccacatcacaccgggtggtggatgcagtccgatggagacgcggtggcgatatttggagggaaacacgtgtggattgaccattgctcgttgtcgaactgcgatgatggactcatagacgctatacatggttccacggctataaccatatcgaacaatcatatgacgcaccatgataaggtcatgcttttaggacatagcgatagttacacgcaggacaagaacatgcaagtcacaattgcgtttaaccatttcggagaaggactcgttcaaagaatgccacggtgcaggcatggatatttccatgtagtgaacaatgattatactcactgggaaatgtatgcaatcggtggaagtgcttctccaactatatacagccaagggaatagatttcttgctcctaacacccgctttaataaagaggttacaaaacatgaagatgcacccgaaagcaaatggagagattggaattggagatcggaaggcgatatgttgttgaacggagcttatttccgcgagtccggtgctgaagctccgtctacttatgcaagagcttcaagcctgagtgcgaggccatcgtcacttgtgggttccatcaccacgacagcaggcactttgagttgtcggcgaggccgtcgctgttaa

SEQ ID NO: 846 - protein, 412 aa, Arabidopsis thaliana
MVSYSNNHFAYAFLLLLTIGNTLAFSSSLPDHVQDPNLVVDDVNRSVFNASRRSLAYLSCRTGNPIDDCWRCDPNWETNRQRLADCAIGFGKNAIGGRKGRIYVVTDPANDDPVNPRPGTLRYAVTQEEPLWIIFKRDMVIRLKKELIITSFKTIDGRGSSVHITDGPCLKIHYATNIIIHGINIHDCKPGSGGMIKDGPHHTGWWMQSDGDAVAIFGGKHVWIDHCSLSNCDDGLIDAIHGSTAITISNNHMTHHDKVMLLGHSDSYTQDKNMQVTIAFNHFGEGLVQRMPRCRHGYFHVVNNDYTHWEMYAIGGSASPTIYSQGNRFLAPNTRFNKEVTKHEDAPESKWRDWNWRSEGDMLLNGAYFRESGAEAPSTYARASSLSARPSSLVGSITTTAGTLSCRRGRRC

SEQ ID NO: 847 - DNA, 1557 bp, Arabidopsis thaliana
  CDS (1)..(1557)
atggtggctcatgagaggaggatccataatcttcaaaaaccaacgtgcatttgcattatctggttttgcctcttggtttctctctctcaccatggaagagcatcatcaacctcagcatctatcttcaatctttctctcccacaccaacacccattccctgaacatgttgttcttaatgttcaaagaaaactcaacgattctctctcaagaagacaacttctcacttaccaacaagacgacggcaccacggcgtcgtcaccaataccttcttgcatcaccggaaacccaatcgacgattgttggcgctgcgacccaaactggtcggcaaaccgccaaagactcgccgattgctcaattggtttcggacaaggaacactcggaggaaaaggcggtcagttttacctcgtcaccgattcctccgacaacgacgcagcgaatccaattcccggaactcttcgacacgccgtgattcagccagaaccactatggatcatcttctccagcgacatgggaatcaaactcaaacacgagctcatcatcggaagctacaagacaatcgatggaagaggcacgaatatccaaatcaccggccatggttgcctcacgattcagcaggttagccacgtcatcatccacaacgttcacattcaccactgtaaaccctccggcaacactttggtcgcttcgtcgcctacacatgttggatttcgaggagtctccgacggagacggaatctcagtatcagcttctcatcacatttgggtcgatcactgttctctcggttactgtgcggacggactcatcgacgtcatcctcgcttccaccgccgtcacaatctccaacaactatttctctcatcacgacgaggttatgctcctaggtcacgacgaccggtacacggctgataaggggatgcaagtaacaattgcattcaaccatttcggagaagggcttgttcagaggatgccgcggtgtaggcacggttatatccacgtggtgaacaacgacttcacggcatgggaaatgtatgcaatcggcggaagtgctagccctacaattaatagtcagggtaaccgttacaccgcacctattgatcccaatgccaaagaggtaacgaagcgcgtggactcaaacgagaaacattggtcgggatggaactggagaacggaaggtgacgttatggttaacggagcttttttcgtgccgtcaggtgacggagtgagcccagcgtatgccagagccaccagtgttcagcctaaagccgccgcgatcattgaccagctcacggtcaatgccggcgttttcggcgatccaagtgggagaaacggccaaggaggaagctttcccggaattacgaacggtggtgggaccatcacgcgcggttacagtaaaagtggacctgccggcggtggcagcggcagtgacagtgatgatgggcttttcacattgatattcggtaacaatagcggtgcggtggctctaaggccgggacaggtctggtcgattctattgattatcattttatattggtatattccacaccatacgagatcatag

SEQ ID NO: 848 - protein, 518 aa, Arabidopsis thaliana
MVAHERRIHNLQKPTCICIIWFCLLVSLSHHGRASSTSASIFNLSLPHQHPFPEHVVLNVQRKLNDSLSRRQLLTYQQDDGTTASSPIPSCITGNPIDDCWRCDPNWSANRQRLADCSIGFGQGTLGGKGGQFYLVTDSSDNDAANPIPGTLRHAVIQPEPLWIIFSSDMGIKLKHELIIGSYKTIDGRGTNIQITGHGCLTIQQVSHVIIHNVHIHHCKPSGNTLVASSPTHVGFRGVSDGDGISVSASHHIWVDHCSLGYCADGLIDVILASTAVTISNNYFSHHDEVMLLGHDDRYTADKGMQVTIAFNHFGEGLVQRMPRCRHGYIHVVNNDFTAWEMYAIGGSASPTINSQGNRYTAPIDPNAKEVTKRVDSNEKHWSGWNWRTEGDVMVNGAFFVPSGDGVSPAYARATSVQPKAAAIIDQLTVNAGVFGDPSGRNGQGGSFPGITNGGGTITRGYSKSGPAGGGSGSDSDDGLFTLIFGNNSGAVALRPGQVWSILLIIILYWYIPHHTRS

SEQ ID NO: 849 - DNA, 1404 bp, Oryza sativa (japonica cultivar-group)
  CDS (1)..(1404)
atggccgggcccgtcgaatccacccgcattaccctcctcctcgtcgccgccaccctcctcctcctcccgccgccgctcgccgcctccctcaactcctccctccccgaccccgccgccgtcgtcgccgacttccacagcaaggtggcgacgtcgcggcggcggatgcagaaggccgacggcggcggcggcggtggcggcggggggtgtttgacggggaaccccatcgaccactgctggcggtgcgccgggacggactggaggcaggaccggcagcggctggcggactgcggcatcgggttcgggcgcaacgccatgggcggcaagggcgggccggtgtacgtcgtcaccgacccctccgacggcgacccggtgaaccccgcgccggggacgctccggtacggcgccatccaggagggccccctctggatcgtgttcgccggcgacatgaccatccgcctcaacgaggagctcctcgtgaacagctacaagaccatcgacggccgcggcgccaacgtccacgtcggcgccggcggcgcgtgcatcacgctccagtacgtctccaacgtcatcatccacaacatccacgtccacgactgcgtccccgccggcaacgccaacgtgcgcgcctcgccgacgcactacgggtggcgcacccgctccgacggcgacggcatctcgctctactcggcgcgcgacgtgtgggtggaccactgcgcgctgtcgcgctgcgccgacggcctcatcgacgccatcatggggtccacggcgatcaccgtgtcgaacagctacttctcgcaccacaacgaggtgatgctgctggggcacagcgacgggtacctgccggactcggcgatgcaggtgaccatcgcgttcaaccacttcgggatccagctcgtgcagcggatgcctcggtgcaggagggggtacttccacatcgtcaacaacgactacacggcgtgggagatgtacgccattggagggagcgcgagccccaccatcaacagccagggcaaccgctacatcgcccccgccgatcccaacgccaaggaggtgacgaagcgggtggacacggaggaggggcagtgggcggggtggaactggaggacggagggggacatgatggtcaacggcgccttcttcgtcccctccggcgagggcctcgaggccatctacgacaaggcctccagcaccgaccccaagtcgtcggcgctcgtcgaccagctcaccgccggcgccggcgtcctcggcggccccagaggagttgggtctggagtggatctaattcattttgtgagagctccatccaactccactcccagttctagtggagctgaaactgtttggccaagctccagctctagaaggggtggagctggagctgtgccaaacaggcccgtactatag

SEQ ID NO: 850 - protein, 467 aa, Oryza sativa (japonica cultivar-group)
MAGPVESTRITLLLVAATLLLLPPPLAASLNSSLPDPAAVVADFHSKVATSRRRMQKADGGGGGGGGGCLTGNPIDHCWRCAGTDWRQDRQRLADCGIGFGRNAMGGKGGPVYVVTDPSDGDPVNPAPGTLRYGAIQEGPLWIVFAGDMTIRLNEELLVNSYKTIDGRGANVHVGAGGACITLQYVSNVIIHNIHVHDCVPAGNANVRASPTHYGWRTRSDGDGISLYSARDVWVDHCALSRCADGLIDAIMGSTAITVSNSYFSHHNEVMLLGHSDGYLPDSAMQVTIAFNHFGIQLVQRMPRCRRGYFHIVNNDYTAWEMYAIGGSASPTINSQGNRYIAPADPNAKEVTKRVDTEEGQWAGWNWRTEGDMMVNGAFFVPSGEGLEAIYDKASSTDPKSSALVDQLTAGAGVLGGPRGVGSGVDLIHFVRAPSNSTPSSSGAETVWPSSSSRRGGAGAVPNRPVL

SEQ ID NO: 851 - DNA, 1419 bp, Oryza sativa (japonica cultivar-group)
  CDS (1)..(1419)
atggcggaggcggcggcgaggaggtgggcggcggcgctggtgctgctggtgcttctcaccggcaccgtcgagctcatcggcggcggaggcgggagcggcgggcggcggcttctcgctggcctccgggccgggagcacggcggcggcgagcggcacgcggcggtggctgcgcgactcgtcctggccggcgacggcggcggccgcggcggcggcgagaggagatgacggtgatggcgatgaggcgtcgtcggcggcgatgacggtgcccggcgcggtggacgacccggaggaggtggtctcgcaagtgcacatgtcgatcaggaacagcacggcgaggaggaagctgggctacctgtcgtgcggcaccggcaatccgatcgacgactgctggaggtgcgacccggactggcacaagaatcgccagcggctcgccgactgcggcatcggcttcggccgcaacgccatcggcggccgcgacggcaagatctacgtggtcaccgaccccagcgacgacgacgcggtgaaccccaagaagggcacgctccggtacgccgtcatccgcgacgagccgctgtggatcgtcttcaagcgcgacatggtgatcacgctcaagcaggagctgatcatgaacagcttcaagaccatcgacggccgtggcgccaacgtgcacatcgccaatggcgcctgcatcaccatccagtacgtcaccaacgtcatcatccatggcctgcacatccatgactgcaggcccaccggcaatgccatggtccggagctcgcccagccactacgggtggcgcaccatggccgacggcgacgccgtctccatcttcggcgccagccacatctgggttgaccattgctcgctctccaactgcgccgacggcctcatcgacgccatcatgggttccactgcaatcacagtgtccaacaactacttcacccaccacaatgaggtgatgctcctgggtcacagcgattcctatgtcaaggacaaggcaatgcaggtcacgatagcattcaaccatttcggagaaggtcttattcagagaatgccaaggtgcaggcatggttacttccatgtggtgaacaatgactacacccactgggagatgtacgcaattggtggaagtgctgagccaaccatcaacagccagggcaaccgctaccttgctccgacaaatccctttgccaaggaggttacaaagagggttgagactgctcagaccatctggaagggctggaactggagatcagagggggatctcctcctgaacggcgccttcttcaccccatcaggtgcaggcgcctcggccagctactcgcgcgcctcaagcctcggtgccaagtcatcatccatggttggcaccatcacatccggtgcgggcgccttgtcgtgccgcgggggctcagcctgctag

SEQ ID NO: 852 - protein, 472 aa, Oryza sativa (japonica cultivar-group)
MAEAAARRWAAALVLLVLLTGTVELIGGGGGSGGRRLLAGLRAGSTAAASGTRRWLRDSSWPATAAAAAAARGDDGDGDEASSAAMTVPGAVDDPEEVVSQVHMSIRNSTARRKLGYLSCGTGNPIDDCWRCDPDWHKNRQRLADCGIGFGRNAIGGRDGKIYVVTDPSDDDAVNPKKGTLRYAVIRDEPLWIVFKRDMVITLKQELIMNSFKTIDGRGANVHIANGACITIQYVTNVIIHGLHIHDCRPTGNAMVRSSPSHYGWRTMADGDAVSIFGASHIWVDHCSLSNCADGLIDAIMGSTAITVSNNYFTHHNEVMLLGHSDSYVKDKAMQVTIAFNHFGEGLIQRMPRCRHGYFHVVNNDYTHWEMYAIGGSAEPTINSQGNRYLAPTNPFAKEVTKRVETAQTIWKGWNWRSEGDLLLNGAFFTPSGAGASASYSRASSLGAKSSSMVGTITSGAGALSCRGGSAC

SEQ ID NO: 853 - DNA, 1242 bp, Prunus mume
  CDS (1)..(1242)
atggcgaggccctcctcaggcccctcacctctctctctcctcagcttcctcctcttctctctcctcaccccaaccctcattgcctccagaccattgcagcaaaaccctgaattggttgtacaagatgtacaacggagcatcaatgactctgtttctaggaggaacttgggctacttgtcatgtgggactggaaaccccattgatgattgctggcgatgtgacccaaattgggagcagaacagggagaggctggcagattgcgcaattgggtttgggaaaaatgccgttggtggaagagatggcaagatttacgtggtcacggattcaggggatagcgaccctgtaaacccaaagccagggactctacgacatgccgttattcaggacgagccactgtggatcatcttccagcgtgacatgacaatccaactgaaggaagagctgatcatgaactctttcaagaccatcgacggtcgaggagccagcgtgcacattgctggtgggccatgcatcaccatccaatttgtgaccaacattatcattcatggtctgcacatacacgattgcaagcagggagggaatgctatggtgcggtcctccccagagcactacgggtggaggactatatccgacggtgatggcgtgtccatcttcggtgggagccacgtgtgggtggatcattgctctttgtcaaattgcaaagatgggttggttgatgcaattcatgggtccactgccataacaatttctaacaattacatgactcaccatgacaaagtgatgttgcttgggcatagcgattcttataccgaagataagaacatgcaagtcaccattgccttcaatcactttggagaagggttggtccagcgaatgccaagatgtaggcatggatatttccatgtggtgaacaatgactacacccattgggagatgtatgccattggaggcagtgccaaccctacaatcaatagccaagggaatagatttgctgcaccagatatcagatttagcaaagaggtgacaaaacatgaggatgcaccagaaagtgagtggaggaattggaattggaggtctgaaggagacttgatgataaatggtgcattttttacagcatcaggagctggagcttcctcaagctatgcaagggcttcaagcttgggggcaaagccatcttctctagtgggttcaataaccacagcttctggtgcacttagctgcagaaagggttctcgttgctga

SEQ ID NO: 854 - protein, 413 aa, Prunus mume
MARPSSGPSPLSLLSFLLFSLLTPTLIASRPLQQNPELVVQDVQRSINDSVSRRNLGYLSCGTGNPIDDCWRCDPNWEQNRERLADCAIGFGKNAVGGRDGKIYVVTDSGDSDPVNPKPGTLRHAVIQDEPLWIIFQRDMTIQLKEELIMNSFKTIDGRGASVHIAGGPCITIQFVTNIIIHGLHIHDCKQGGNAMVRSSPEHYGWRTISDGDGVSIFGGSHVWVDHCSLSNCKDGLVDAIHGSTAITISNNYMTHHDKVMLLGHSDSYTEDKNMQVTIAFNHFGEGLVQRMPRCRHGYFHVVNNDYTHWEMYAIGGSANPTINSQGNRFAAPDIRFSKEVTKHEDAPESEWRNWNWRSEGDLMINGAFFTASGAGASSSYARASSLGAKPSSLVGSITTASGALSCRKGSRC

SEQ ID NO: 855 - DNA, 1539 bp, Gossypium hirsutum
  CDS (36)..(1271)
gaccttgcctcacaaaacaagcaaacaaaggtaaaatggcaaggacaatggcaatggcgatcccttcacttcctcttctcttcctctttacatttctgcttctactcccacttctcatttcctcttcccctgttcaagaccctgagcttgttgtccaagatgttcacagggctatcaatgcgtccaagaggaacctagggtatctctcctgtggaaccggaaaccccattgatgactgctggagatgtgaccccaactgggagactaatcgccagaagctagctgattgtgccattggattcggcaagaacgccattggtggaagagatggtaagatttatgtggtcactgactccggcgatgatgaccccgttaaccccaaaccagggacattacggcatgcggtgattcaaggcgaaccgttgtggatcattttcgctcgtgacatgaccattcagctgaaagaagagctgataatgaactcattcaagaccatcgacggtaggggcgccagcgttcatattgcagggggtccatgcattaccgttcagtatgtgaccaacattatcattcatggactcaacatacacgattgtaaacaaggagggaatgctatggtgagggactccccacgtcactatggttggaggacgatatcagacggtgatggtgtttccatcttcggtggtagccatgtttgggttgaccataactccttatcaaactgcaaagacggcttgattgacgctatccatggctccaccgctatcaccatttccaacaattacatgactcaccatgataaagtcatgttattgggacacagtgattcctatactcaagacaagaacatgcaagtcactattgcctttaatcactttggtgaaggccttgtccaaagaatgccacgatgtagacatgggtatttccacgtggtgaacaatgactatactcattgggaaatgtatgccattggaggaagtgctaacccaacaataaacagccaagggaatagatttactgcacctgacaacagattcagcaaagaggtgaccaagcatgaggatgcaccggagagtgaatggaagagctggaattggagatcggaaggtgacctaatggtgaacggtgcattctttatctcgtcgggtgctggcgcctcgtcgagctatgccaaggcttcaagcttgggtgttaggccatcttcactggtggcaacgataacgaccaatgctggtgcacttaattgcaagaaaggttcacgttgttgatgataatgatggcgacacatgtgagtgaaacaagacagtttattacaagtgattgaagtgatttaatgttgggttcttgtgcaattacatttagttagagaaatcagaaatgatttttaaaaagaaggaaggataaagaaaaagtctagagttaaaaggacttctgtgttcccttccattattttttttttcttggtttatttattcatgtatgacgattacaacctcggcctgttgcaaaaaaaaaaaaaaaaaaaaaaaaaaaaaa

SEQ ID NO: 856 - protein, 411 aa, Gossypium hirsutum
MARTMAMAIPSLPLLFLFTFLLLLPLLISSSPVQDPELVVQDVHRAINASKRNLGYLSCGTGNPIDDCWRCDPNWETNRQKLADCAIGFGKNAIGGRDGKIYVVTDSGDDDPVNPKPGTLRHAVIQGEPLWIIFARDMTIQLKEELIMNSFKTIDGRGASVHIAGGPCITVQYVTNIIIHGLNIHDCKQGGNAMVRDSPRHYGWRTISDGDGVSIFGGSHVWVDHNSLSNCKDGLIDAIHGSTAITISNNYMTHHDKVMLLGHSDSYTQDKNMQVTIAFNHFGEGLVQRMPRCRHGYFHVVNNDYTHWEMYAIGGSANPTINSQGNRFTAPDNRFSKEVTKHEDAPESEWKSWNWRSEGDLMVNGAFFISSGAGASSSYAKASSLGVRPSSLVATITTNAGALNCKKGSRC

SEQ ID NO: 857 - DNA, 1314 bp, Mangifera indica
  CDS (1)..(1314)
atggcggtttctcctagatggataagttccgtatgtgcattactgattctatgtctatttctcggcgttaaagcatcgacagtgaagcacgagctaaactataggttgttgaactccaaaaatacatccatagcggacagttcggatgattcatggagccagcacgctgttgataatccagaggaggtagctgctatggtcgacatatcaattcgtaatagtactgaaagaagaaggttaggatatttctcatgtgaaactggaaacccaatcgatgattgttggcgttgtgaccctaaatggcatttgcaccgaaaacatcttgctgattgtgccattggttttgggcgcaatgccattggtggccgtgatggcaagttctatgttgtaagtgactctagcgatgataatcctgttgatcctaaaccaggcacacttcgtcatgctgtcatccaagacaggcctttgtggattgtgttcaaacaggacatggcgatcacactcaagcaagagcttataatgaatagcttcaagacaattgatggtcgtggtgtcaatgtccatattgctaatggggcttgcatcaccattcaatacattaccaatgtcattattcacggtatacatatccatgattgtaaaccaactggcaatgccatggtgagaagctccccaagccattacgggtggaggacaatggctgatggtgatggcatttcaatttttggagcaagccatatttggattgaccacaattctctatctaattgtgctgatggtcttattgatgctataatggcctcaacagcaattactatttccaataactacttcacccaccataacgaggttatgctattgggacacagtgactcgtatacaagagacaagcagatgcaagtgaccatcgcctacaaccatttcggtgaaggtcttatccagagaatgccacggtgcaggcatgggtatttccacgtggtgaacaatgactatacacactgggaaatgtttgctattggtggaagtgctgatcccaccattaacagccagggcaacagataccttgccccctcaaatccctttgccaaggaggtaacaaagagggtggatacatcagacggtgtatggaagagttggaattggcgatcagagggagatctgttgctgaatggagcctacttcatttcatcgggagctcgatctgctgccagctatgcaagggcatcaagcttaggggcaaaatcctcttccttggttggcgctcttacctctagcgctggtgctatgtcctgccgcgttggtagacaatgttaa

SEQ ID NO: 858 - protein, 437 aa, Mangifera indica
MAVSPRWISSVCALLILCLFLGVKASTVKHELNYRLLNSKNTSIADSSDDSWSQHAVDNPEEVAAMVDISIRNSTERRRLGYFSCETGNPIDDCWRCDPKWHLHRKHLADCAIGFGRNAIGGRDGKFYVVSDSSDDNPVDPKPGTLRHAVIQDRPLWIVFKQDMAITLKQELIMNSFKTIDGRGVNVHIANGACITIQYITNVIIHGIHIHDCKPTGNAMVRSSPSHYGWRTMADGDGISIFGASHIWIDHNSLSNCADGLIDAIMASTAITISNNYFTHHNEVMLLGHSDSYTRDKQMQVTIAYNHFGEGLIQRMPRCRHGYFHVVNNDYTHWEMFAIGGSADPTINSQGNRYLAPSNPFAKEVTKRVDTSDGVWKSWNWRSEGDLLLNGAYFISSGARSAASYARASSLGAKSSSLVGALTSSAGAMSCRVGRQC

SEQ ID NO: 859 - DNA, 1787 bp, Brassica napus
  CDS (230)..(1732)
ggaagaccccattaaccactgtctccagcagagagcagaagcaagagaaaaaaaaaagagaggagagagaacatcttcttcttcactttcttcctcagagctctctctctctctctcatgtggattccaaatccttctctgcttctccttcctcacatttctcaaccagcattcttcttcttttgacactttcaacacactgcaagtactgctcaatgagcaattaacgatgctgcttcctcacttctccaccgccattttcctcctctgcctcttcttcacactcctccaagccactaatctcactctccctcaccagcatcattcccctgactccgtcgctctccacgtcttaagttcaatcaatgcatccctctcacggagacaactctcctcctccagttgccgcaccggcaacccaatcgacgactgctggcgctgcacctcctcggactggtcctccaaccgccaacgcctcgccgactgctccatcggcttcggccgcggcacactcggcggcaaaaacggcaagatctacgtcgtcacagactcctccgacaacagcccatcaaacccaacccccggaacactccgctacgccgtcatccaagaagagcccctctggatcgtcttctcctccaacatgctcatccgcctcaaacacgaactcatcatcaacagctacaaaaccatcgacggccggggctccgccgtccacatcaccggcaacggctgcctgaccatccagtacgtgcaacacgtcatcatccacaacgtccacatctacgactgcaaaccctcggggggcgccgtggtcgccgcgacgccgacgaaatccgggaggcggggcagatcggacggcgacgggatctccatcttcggagctcagaagatctggatcgaccactgctccatgagccattgcaccgacgggcttatcgacgcggtgatggggtccacggcgattacgatatcgaataactacttcgcgcatcatgatgaggtgatgctgttgggtcatgacgatagttatggcccggacacggggatgcaggtgacgattgcgtttaaccatttcggacaggggcttgttcagaggatgccgaggtgtcggagagggtatatacacgtggtgaataatgatttcacgtcgtggaagatgtatgcgattggtggaagtggtaatcctacgattaacagtcaggggaatcgttacattgctccttctgatcctagcgccaaagaggtgacgaagcgagtggattcgaaggacgatggagagtggtcgaattggaattggagaactgaaggagatctgatggagaacggagctttctttgtggcgtctggtgggggagtgagcgcattgtactctaaagcttcgagtgtggagcctaaagcttcggctcttgtagaccagctcactcgaaatgctggcgtttttggtggtcccagggatgatcaaggtcagactggcgattcttattctggttatggaggtggtggtggtggtggtggtagtggtggcggcggaggtggaagcagcggcagcgatggaggaactagtgctattggcggtactacgagaggaagtagcaccagcagcagcgatgacagcaatttcttcgggatgatcttcggaagcaatgcaccgcctcgaccacgtttaacattattgttttgtttgataatgatttgtgtaatgtcaatatcaagtctattattgttgtagtccgcaaggataactaataggatttggacccttcaattgattggttgttggcttg

SEQ ID NO: 860 - protein, 500 aa, Brassica napus
MLLPHFSTAIFLLCLFFTLLQATNLTLPHQHHSPDSVALHVLSSINASLSRRQLSSSSCRTGNPIDDCWRCTSSDWSSNRQRLADCSIGFGRGTLGGKNGKIYVVTDSSDNSPSNPTPGTLRYAVIQEEPLWIVFSSNMLIRLKHELIINSYKTIDGRGSAVHITGNGCLTIQYVQHVIIHNVHIYDCKPSGGAVVAATPTKSGRRGRSDGDGISIFGAQKIWIDHCSMSHCTDGLIDAVMGSTAITISNNYFAHHDEVMLLGHDDSYGPDTGMQVTIAFNHFGQGLVQRMPRCRRGYIHVVNNDFTSWKMYAIGGSGNPTINSQGNRYIAPSDPSAKEVTKRVDSKDDGEWSNWNWRTEGDLMENGAFFVASGGGVSALYSKASSVEPKASALVDQLTRNAGVFGGPRDDQGQTGDSYSGYGGGGGGGGSGGGGGGSSGSDGGTSAIGGTTRGSSTSSSDDSNFFGMIFGSNAPPRPRLTLLFCLIMICVMSISSLLLL

SEQ ID NO: 861 - DNA, 1660 bp, Malus domestica
  CDS (74)..(1330)
actcacaaacacacctcctctctctctgccttctctctctttgcttgcctcagtgccttgcacattcaaaaaaatgccaaaaatgccaaggccctcctcaggcccctcacttctctctcccctcctcctcctccctctcctctctctcctctccccaaccctcatttcctccaggccacttcatctccaagaccctgaattggtagtacaagaggtacaaaggaatattagcgactcagtatctaggaggaacttgggctacttgtcatgcgggaccggcaaccctatcgacgactgctggcggtgcgacccgaactgggagaagaacaggcagagcttagctgattgtgcgatagggttcggaaagaacgccataggtggaagagacgggaagatttacgtggtcacagattccggcgatgacgaccccgtgaaccccaagccaggaaccctacgacacgccgtcatccaagacgagccattatggatcattttccagcgtgacatgaccatccagctgaaggaggagctgatcatgaactccttcaagacaatcgacggccggggagcgtccgtacacattgccggcgggccatgcatcaccatccagttcgtgaccaacattattatccacggactgcacatacacgattgcaagcagggtgggaacgctatggtgaggagctcccccaggcacttcgggtggaggaccgtatcggacggcgacggcgtgtcgatcttcggtgggagccacgtgtgggtggaccattgctcgttgtccaactgcaaagatgggttggttgatgcaatttatgggtccactgcgataacgatttcgaacaattacatgacgcaccatgataaggtgatgcttttggggcatagcgattcgtataccaacgacaagaacatgcaaatcaccattgcgttcaatcactttggagaaggcttggtccaaagaatgccaagatgtaggcatggatatttccatgtggtgaacaatgactacacccattgggagatgtatgccattggtgggagtgcagaccctacaatcaatagccaagggaacagatttgctgcaccagatatcagatccagcaaagaggtgaccaaacatgaggatgcaccagaaagtgaatggaagaattggaactggaggtcggaaggcgacttgatgctcaacggtgcgttttttactgcatcaggtgccggagcttcctctagctacgccagggcttcgagcttgggtgcaaagccatcttctctagtgggtgcgattaccacggcttccggcgcacttagttgccgaaagggctctcgttgctgattgcatatcgagcttgtggcctattgaaaacgacattcctaaagtgattagctgaagaactattcaagttcaattagacatatttaggagggaagtgagaggaaaacgacatttcctccaaacaatattttctactttgtccctttgcttttttactgtttttaagtcaattttcatgatgattacaacctcgctttgtttctctgaggctgcattagggtttctgttcaagaatcttgatgacctataagagaagacaagtgttgaagtgttgactatactaaattatcaatctatttcctgatatttgataaaaaaaaaaaaaaaaaa

SEQ ID NO: 862 - protein, 418 aa, Malus domestica
MPKMPRPSSGPSLLSPLLLLPLLSLLSPTLISSRPLHLQDPELVVQEVQRNISDSVSRRNLGYLSCGTGNPIDDCWRCDPNWEKNRQSLADCAIGFGKNAIGGRDGKIYVVTDSGDDDPVNPKPGTLRHAVIQDEPLWIIFQRDMTIQLKEELIMNSFKTIDGRGASVHIAGGPCITIQFVTNIIIHGLHIHDCKQGGNAMVRSSPRHFGWRTVSDGDGVSIFGGSHVWVDHCSLSNCKDGLVDAIYGSTAITISNNYMTHHDKVMLLGHSDSYTNDKNMQITIAFNHFGEGLVQRMPRCRHGYFHVVNNDYTHWEMYAIGGSADPTINSQGNRFAAPDIRSSKEVTKHEDAPESEWKNWNWRSEGDLMLNGAFFTASGAGASSSYARASSLGAKPSSLVGAITTASGALSCRKGSRC

SEQ ID NO: 863 - DNA, 1830 bp, Musa acuminata
  CDS (79)..(1443)
gaattcggcacgagctgttctctccttcgatcacatctttttgctctgggaaacgtgagaggtgagacgagggcggcaatgacggcgggtttaagatggattcctcctctgcttcttcttcttatgggcttcctgctggttttgaacggaggtcgggggtggattggaagcgagaggtcctctggctcgaggaatggcggagcatcgcggaggagcttgagagaggcctccgcgaacgcgaccagcgccgatgcttccttggaagacagggctgtaaccagggcagcagaagccgcagtcgatgaccccgaggaggttgcttcgacggtcctgacgaccataatcaacagcacggctcgaagatctcttggttatctgtcgtgcggttcaggcaacccgatcgacgactgctggcggtgcgaccccgattggcatgtcaacagaaaaaagctcgctgactgtggcattggctttggccgcaacgcgataggtggccgcgacggggagttgtacgttgtgacagactccggggacgatgatcccgtgaatcctcgcccgggaacacttagatacgccgtcatccaggacgtgcccctctggatcacctttaaacacgacatggagatcacgctcaaggaggaactcattatgaacagctttaagacgatcgatggacgcggtgtcaacgtccacattgccaatggcgcctgcatcaccatccagtacatcaccaacgtcatcatccatggcctccacatccacgactgcaagcccaccgggaatgccatggtccgcagctctccttctcactatggatggagaaccatggctgatggggatgccgtttccattttcggctccagccacatttgggtggaccactgctctctgtccaactgcgccgatggacttgtcgatgccgtcatgggctccactgccattacggtctccaacaattacttcacccaccacaatgaggtcatgcttttgggacacactgattcttatgcaagggacagcatcatgcaagtaacgatcgcatttaaccattttggtgaaggtctgattcagagaatgcccaggtgcaggcatggctacttccacgtggtaaacaatgactacacgcactgggagatgtacgccattggcgggagcgcgaatccaacgatcaacagtcaaggcaacccgataccttgcgccgaccaatccatttgcaaaggaggtaacaaaaagggtggacacagatcaaacacgtggaagaactggaattggaggtcggagggtgacctgcttctgaatggtgcttttttcaccccttccggtgcaggggcttcagccagctacgcacgggcctccagctttggggccaagccctcttccttggttgacacactgacttctgatgctggggtcctgtcttgccaagtcggcactcgatgttaacgtaatgccaagtagcagaacgccacaacccgaaggatgggaaatcgtacttgacggtgttacaaatttcttctatgttacaccgtcagaaatgtcatttcctccaattgcccaacctccgcctggctccatatgtggagcgcatgcggaagcgttgtcagtttcttttattctactttgctgttttagctctgttacaccgtccatctagcaataagtgggtttatagatagacttcatcctggtggcgtgtcgtcacagttgaatttactacaatgcagcagaattttatatagttgcaatttaatcttttgcccgttatccttgtacctttcgcttggtcattgtattggtaggaatggattttgtcatcttaaaaaaaaaaaa

SEQ ID NO: 864 - protein, 454 aa, Musa acuminata
MTAGLRWIPPLLLLLMGFLLVLNGGRGWIGSERSSGSRNGGASRRSLREASANATSADASLEDRAVTRAAEAAVDDPEEVASTVLTTIINSTARRSLGYLSCGSGNPIDDCWRCDPDWHVNRKKLADCGIGFGRNAIGGRDGELYVVTDSGDDDPVNPRPGTLRYAVIQDVPLWITFKHDMEITLKEELIMNSFKTIDGRGVNVHIANGACITIQYITNVIIHGLHIHDCKPTGNAMVRSSPSHYGWRTMADGDAVSIFGSSHIWVDHCSLSNCADGLVDAVMGSTAITVSNNYFTHHNEVMLLGHTDSYARDSIMQVTIAFNHFGEGLIQRMPRCRHGYFHVVNNDYTHWEMYAIGGSANPTINSQGNPIPCADQSICKGGNKKGGHRSNTWKNWNWRSEGDLLLNGAFFTPSGAGASASYARASSFGAKPSSLVDTLTSDAGVLSCQVGTRC

SEQ ID NO: 865 - DNA, 1230 bp, Salix gilgiana
  CDS (1)..(1230)
atgaacaaagagagagcaatgacaattccactttctctttcgatccttctgctgcttattttagctccaaatttcatttcctgttcgccagttcaagatcctgaagtggtagtggaagaagtacacaggagcatcaatgcctccagaagaaaactgggtttcctttcatgtggaaccggcaatccgatagacgattgctggagatgtgaccccaaatggggggagaatcggcagagattagcagattgtgcaatcgggttcggcaagcacgctatcggcggcagggatggcaagatatatgcagtgacagactccggcgacgatgaccctgtgaatcccaagccaggcactcttaggtatgctgttatacaggacgagcctctgtggatcgttttcgctcgggacatggtgatcaagctcagggaagagctgatcatgaactctttcaagacgatcgatggaagaggagccagcgtgcacattgctggtggtccatgcatcactatacagtatgtgaccaacattataatccatggtgtaaatattcatgactgcaagcgaggagggaatgctcatgtgagggattcgccgagtcattatggatggcggactgtttcggacggagatggggtgtcgatattcggaggcagccatgtttgggtggatcattgctctctatccaactgcaatgatgggttgatcgacgcgattcatggatccacggcgataacaatctcaaacaattacctgacccatcacaacaaggtcatgctcctgggtcacagtgatagctataaacaggacaagaacatgcaagtcaccattgccttcaaccactttggtgaaggacttgtgcagagaatgccaaggtgcagacatggatattttcacgtggtgaataatgactacacgcattggaaaatgtatgcaattggcggcagtgctgaccctacaattaatagccaaggcaatagatttcttgctcccaatgataggtttaataaagaggtgactaaacacgaggatgcaccgcagagtgcttggaaggggtggaactggaggtctgaaggggatttgctgctgaacggagcattcttcacggcatccggtgccggagcttcttctagctacgccaaggcgtcaagcttaggtgcaagatcgtcttccttggttagctccatcacggcaggagcaggctcactcgtttgcaagaagggttcccggtgctga

SEQ ID NO: 866 - protein, 409 aa, Salix gilgiana
MNKERAMTIPLSLSILLLLILAPNFISCSPVQDPEVVVEEVHRSINASRRKLGFLSCGTGNPIDDCWRCDPKWGENRQRLADCAIGFGKHAIGGRDGKIYAVTDSGDDDPVNPKPGTLRYAVIQDEPLWIVFARDMVIKLREELIMNSFKTIDGRGASVHIAGGPCITIQYVTNIIIHGVNIHDCKRGGNAHVRDSPSHYGWRTVSDGDGVSIFGGSHVWVDHCSLSNCNDGLIDAIHGSTAITISNNYLTHHNKVMLLGHSDSYKQDKNMQVTIAFNHFGEGLVQRMPRCRHGYFHVVNNDYTHWKMYAIGGSADPTINSQGNRFLAPNDRFNKEVTKHEDAPQSAWKGWNWRSEGDLLLNGAFFTASGAGASSSYAKASSLGARSSSLVSSITAGAGSLVCKKGSRC

SEQ ID NO: 867 - DNA, 1362 bp, Oryza sativa
  CDS (1)..(1362)
atggccgggcccgtcgaatccacccgcattaccctcctcctcgtcgccgccaccctcctcctcctcccgccgccgctcgccgcctccctcaactcctccctccccgaccccgccgccgtcgtcgccgacttccacagcaaggtggcgacgtcgcggcggcggatgcaggaggccggcggcggcggcggcggtggcggcggggggtgtttgacggggaaccccatcgacgactgctggcggtgcgccgggacggactggaggcaggaccggcagcggctggcggactgcggcatcgggttcgggcgcaacgccatgggcggcaagggcgggccggtgtacgtcgtcaccgacccctccgacggcgacccggtgaaccccgcgccggggacgctccggtacggcgccatccaggagggccccctctggatcgtgttcgccggcgacatgaccatccgcctcaacgaggagctcctcgtgaacagctacaagaccatcgacggccgcggcgccaacgtccacgtcggcgccggcggcgcgtgcatcacgctccagtacgtctccaacgtcatcatccacaacatccacgtccacgactgcgtccccgccggcaacgccaacgtgcgcgcctcgccgacgcactacgggtggcgcacccgctccgacggcgacggcatctcgctctactcggcgcgcgacgtgtgggtggaccactgcgcgctgtcgcgctgcgccgacggcctcatcgacgccatcatggggtccacggcgatcaccgtgtcgaacagctacttctcgcaccacaacgaggtgatgctgctggggcacagcgacgggtacctgccggactcggcgatgcaggtgaccatcgcgttcaaccacttcgggatccagctcgtgcagcggatgcctcggtgcaggagggggtacttccacatcgtcaacaacgactacacggcgtgggagatgtacgccattggagggagcgcgagccccaccatcaacagccagggcaaccgctacatcgcccccgccgatcccaacgccaaggaggtgacgaagcgggtggacacggaggaggggcagtgggcggggtggaactggaggacggagggggacatgatggtcaacggcgccttcttcgtcccctccggcgagggcctcgaggccatctacgacaaggcctccagcaccgaccccaagtcgtcggcgctcgtcgaccagctcaccgccggcgccggcgtcctcggcggccccagcggcgcctttaaactgccacctccggtcgccggaggggcgccgcttgtcgagttgttgtcggcgccattgccgcgacctggatgggtagagagggatttgcggtag

SEQ ID NO: 868 - protein, 453 aa, Oryza sativa
MAGPVESTRITLLLVAATLLLLPPPLAASLNSSLPDPAAVVADFHSKVATSRRRMQEAGGGGGGGGGGCLTGNPIDDCWRCAGTDWRQDRQRLADCGIGFGRNAMGGKGGPVYVVTDPSDGDPVNPAPGTLRYGAIQEGPLWIVFAGDMTIRLNEELLVNSYKTIDGRGANVHVGAGGACITLQYVSNVIIHNIHVHDCVPAGNANVRASPTHYGWRTRSDGDGISLYSARDVWVDHCALSRCADGLIDAIMGSTAITVSNSYFSHHNEVMLLGHSDGYLPDSAMQVTIAFNHFGIQLVQRMPRCRRGYFHIVNNDYTAWEMYAIGGSASPTINSQGNRYIAPADPNAKEVTKRVDTEEGQWAGWNWRTEGDMMVNGAFFVPSGEGLEAIYDKASSTDPKSSALVDQLTAGAGVLGGPSGAFKLPPPVAGGAPLVELLSAPLPRPGWVERDLR

SEQ ID NO: 869 - DNA, 1437 bp, Vitis vinifera
  CDS (20)..(1216)
aaaaatggccacctttgcaatgtctcttctcttcttgttctctcttcttcctccaattcttggttcccccgcaccagtccaagaccctgaagtagttgtgcaagaggtgcacaggagcatcaatgcctctaggaggaacttgggctatttctcttgtggaacaggcaaccctatcgacgattgctggaggtgcgacgccaactgggacaagaaccgccagcgattagccgactgcgctattgggtttggcaaggatgcaatgggcggaaagaatggtagaatttacgtggtcaccgactccgaggatgatgaccctgtcaatccaaggccagggactctccgtcatgctgtgatccaagatgagccattgtggatcatcttcaagcgtgacatggtcatcaagctgaagcaagagctggtgatgaactcgttcaagacaattgatggtaggggtgctagcgttcacattgctggagggccatgcattaccatccattacgccagtaacatcatcatacatggtctccatatccatgactgtaagcaaggagggaatgccaacatcagaaactctcctcaccactccggctggtggactgtatctgatggtgatggggtgtccatcttcggtgggaggcatatatgggttgaccattgctctttgtccaactgccatgacggcctcattgatgccatccatggatccaccgccataaccatctctaacaatttcatgactcaccatgacaaggtcatgctcctgggccacagcgattcttatacagaagacaagaacatgcaagtcaccattgccttcaaccatttcggagaggggctcgtgcagagaatgcccagatgtaggcatgggtattttcatgtggtgaacaacgactacacccactgggaaatgtatgccattggtggaagtgctgaccctaccatcaacagccagggcaacagattcctagcacccaatgatagatttaagaaagctgtgacaaagcatgaggatgcaccagaaagtgagtggaggcattggaactggagatctgaaggggacctgatgttgaatggtgccttcttcctgcagtcgggggcaggcgcttcttcctcgtacgccagacgttccagcttgagtgccagaccatcttctctggtgggttcaatcaccttgggttctggcgcactcggctgcaggaaggggtctcgttgctaattaaatgaagggatgtacccataacaagtattactattatcattatccaaaaattataggttcgattagggtttatctttctttctagtgctcacttaactgattatccacctgggtctgatgcttggagaagcatgttgagttccctgggaggcagttaagttgcaataccacttaatgaaaatgaaatttaagcaccaaaaaaaaaaaaaaaaaaaaaa

SEQ ID NO: 870 - protein, 398 aa, Vitis vinifera
MSLLFLFSLLPPILGSPAPVQDPEVVVQEVHRSINASRRNLGYFSCGTGNPIDDCWRCDANWDKNRQRLADCAIGFGKDAMGGKNGRIYVVTDSEDDDPVNPRPGTLRHAVIQDEPLWIIFKRDMVIKLKQELVMNSFKTIDGRGASVHIAGGPCITIHYASNIIIHGLHIHDCKQGGNANIRNSPHHSGWWTVSDGDGVSIFGGRHIWVDHCSLSNCHDGLIDAIHGSTAITISNNFMTHHDKVMLLGHSDSYTEDKNMQVTIAFNHFGEGLVQRMPRCRHGYFHVVNNDYTHWEMYAIGGSADPTINSQGNRFLAPNDRFKKAVTKHEDAPESEWRHWNWRSEGDLMLNGAFFLQSGAGASSSYARRSSLSARPSSLVGSITLGSGALGCRKGSRC

SEQ ID NO: 871 - DNA, 1788 bp, Musa acuminata
  CDS (78)..(1442)
ggcacgagcttttctgttctctccttcgatcacatctttttgctctgggaaacgtgagaggtgagaagagggcggcaatgacggcgggtttaagatggattcctcctctgcttcttcttcttctgggcttcctgctggttttgaacggaagtcgggggtggattggaagcgagcggtcctctggctcgaggaatggcggagcatcgcggaggagcttgagagaggcctccgcgaacgcgaccagcgccgatgcttccttggaagagagggctgtaaccagggcagcagaagccgcagtcgacgaccccgaggaggttgcttcgacggtcctgacgaccataatcaacagcacggctcgcagatctcttggttatctgtcgtgcggttcaggcaacccgatcgacgactgctggcggtgcgaccccgattggcatgtcaacagaaaaaagctcgctgactgcggcattggctttggccgcaacgcgataggtggccgcgacggggagttgtacgttgtgacagactccggggacgatgatcccgtgaatcctcgcccgggaacacttagatacgccgtcatccaggacgtgcccctctggatcacctttaaacacgacatggagatcacgctcaaggaggaactcattatgaacagctttaagacgatcgatggacgcggtgtcaacgtccacattgccaatggcgcctgcatcaccatccagtacatcaccaacgtcatcatccacggcctccacatccacgactgcaagcccaccgggaatgccatggtccgcagctctccttctcactatggatggagaaccatggctgatggggatgccgtttccattttcggctccagccacatttgggtggaccactgctctctgtccaactgcgccgatggacttgtcgatgccgtcatgggctccactgccattacggtctccaacaattacttcacccaccacaatgaggtcatgcttttgggacacactgattcttatgcaagggacagcatcatgcaagtaacgatcgcatttaatcattttggtgaaggcctgattcagagaatgcccaggtgcaggcatggctacttccacgtggtaaacaatgactacacgcactgggagatgtacgccattggcggtagcgcgaatccaacgatcaacagtcaaggcaaccgataccttgcgccgaccaatccatttgcaaaggaggtaacaaaaagggtggacacagatcaaagcacgtggaagaactggaattggaggtcggagggtgacctgcttctgaatggtgcttttttcaccccttccggtgcaggggcttcagccagctacgcacgggcctccagctttggggccaagccctcttccttggtcgacacactgacttctgatgctggggtcctgtcttgccaagtcggcactcgatgttaacgtaatgccaagtagcagaacgccacaacccgaaggatgggaaattgtacttgacggtgttacaaatttcttctatgttacaccgtcagaaatgtcatttcctccaattgcccaacctccgcctgcctccatatgtggagcgcatgcggaagcgttgtcagtttcttttattctacttcgctgttttagctcggttacaccgtccatctagcaataagtgggattatagatagacttcatcctggtggcgtgtcgtcacagttgaatttgctacaatgcagcagaattttatatagttgcaatttagtcttttgcccgttatccttgtaaaaaaaaaaaaaaaaaa

SEQ ID NO: 872 - protein, 454 aa, Musa acuminata
MTAGLRWIPPLLLLLLGFLLVLNGSRGWIGSERSSGSRNGGASRRSLREASANATSADASLEERAVTRAAEAAVDDPEEVASTVLTTIINSTARRSLGYLSCGSGNPIDDCWRCDPDWHVNRKKLADCGIGFGRNAIGGRDGELYVVTDSGDDDPVNPRPGTLRYAVIQDVPLWITFKHDMEITLKEELIMNSFKTIDGRGVNVHIANGACITIQYITNVIIHGLHIHDCKPTGNAMVRSSPSHYGWRTMADGDAVSIFGSSHIWVDHCSLSNCADGLVDAVMGSTAITVSNNYFTHHNEVMLLGHTDSYARDSIMQVTIAFNHFGEGLIQRMPRCRHGYFHVVNNDYTHWEMYAIGGSANPTINSQGNRYLAPTNPFAKEVTKRVDTDQSTWKNWNWRSEGDLLLNGAFFTPSGAGASASYARASSFGAKPSSLVDTLTSDAGVLSCQVGTRC

SEQ ID NO: 873 - DNA, 1496 bp, Musa acuminata
  CDS (26)..(1249)
ggcacgagcttaccggagaacaaaaatggcagcattcatgttcttcctcaccatcgcagccttcactgcccccgtctactcttctcgtgcacccttaacgtcagcagctgtccgcgaccctgaattagtagtacaggaagtacaaagaagcttgaacgtgtcgcggcggcgactgggctacttgtcatgcggcaccggcaatccgatcgacgactgctggcggtgcgaccctgactgggctgacaaccggcagcggctcgctgactgcgccatcgggttcgggaagaacgcgattgggggcagggacggcgagatatacgtggtgaccgacagtggcgacgacgaccccgtcaatccgaaaacgggcacgctccggtacgccgtcatccaggaggagccgctgtggatcatcttcaagcgcgacatggtcatccagctgaaggaggagctcatcatgaactcccacaagaccatcgacggccggggcgccagcgtccacatctccggcgggccgtgcatcaccatccagtacgtcaccaacatcatcatccacggcgtccacatccacgactgcaagcagggcgggaacgcgtacgtgcgcgactccccagggcactacgggtggcgcacggtgtcggacggcgacggggtgtccatcttcggcggcagccacgtctgggtcgaccactgcacgctgtccaactgccacgatggcctcatcgacgccattcatggatccaccgcgatcaccatttccaacaactacttgagccaccatgacaaggtcatgctgctgggtcacagcgacgagttgacgtccgacaagagcatgcaggtcaccatagccttcaaccacttcggggaagacctggttcagaggatgccaaggtgtcggcatggctatttccacgtggtgaacaatgactacacccactgggagatgtacgcaattggtgggagtgctgctcccactataaacagccaaggcaacagatttcttgcgcccaatgatcggtttgcaaaagaggtgactaaacgcgaggacgcacaggagagcgagtggaagaagtggaactggaggtcggaaggggaccagatgctgaacggagccttcttcacgccgtccggggccggagcgtcgtcgagctacgcgaaggcttcgagcttgggggccaggtcgtcgtctctcgtcgggaccatcaccgtctctgccggcgttctctcgtgcaagaagggatcccgctgttgaacctcgaccaccacaagcagctcaaagcgatgccgatatatatctatatatatttattctcttattgttgctcatttctcttctttcacgtactgcatggttagccattccgataccaacctctgcctgttaatctgtgaaccacttgggttcaaagtggaaaaccccatctggtttcagaggcagcctgtgcagatgtgttgatactacttgacttgggatttgtctaaaaaaaaaaaaaaaaaaa

SEQ ID NO: 874 - protein, 407 aa, Musa acuminata
MAAFMFFLTIAAFTAPVYSSRAPLTSAAVRDPELVVQEVQRSLNVSRRRLGYLSCGTGNPIDDCWRCDPDWADNRQRLADCAIGFGKNAIGGRDGEIYVVTDSGDDDPVNPKTGTLRYAVIQEEPLWIIFKRDMVIQLKEELIMNSHKTIDGRGASVHISGGPCITIQYVTNIIIHGVHIHDCKQGGNAYVRDSPGHYGWRTVSDGDGVSIFGGSHVWVDHCTLSNCHDGLIDAIHGSTAITISNNYLSHHDKVMLLGHSDELTSDKSMQVTIAFNHFGEDLVQRMPRCRHGYFHVVNNDYTHWEMYAIGGSAAPTINSQGNRFLAPNDRFAKEVTKREDAQESEWKKWNWRSEGDQMLNGAFFTPSGAGASSSYAKASSLGARSSSLVGTITVSAGVLSCKKGSRC

SEQ ID NO: 875 - DNA, 1323 bp, Arabidopsis thaliana
  CDS (1)..(1323)
atggtgatctttagcagaagcttcttagctctctcaacgactctaatcattctagcattatgtataaattcatcaacaatggctcaagaaacagaggacctaaactctcatagctcgagtaattcatcaacggctaataagttacctaacgacgacggtgcatggaatgaacacgcagttaaaaacccagaagaagtagctgcaatggtcgatatgaaaataaagaacagtacagagcggaggaggttaggattcttctcatgcgccaccggaaacccaatagacgactgttggagatgtgatcggaattggcatctccgacgaaagcgtctcgcgaattgcgcgatcggattcggtcgtaacgctatcggaggacgagatggtcgttactacgtagtcacagatccatctgaccacgacgcggttaatccacgaccaggaacactccgtcacgctgtgatacaagaccgtccgttatggatcgtcttcaagcgagacatggtgattactctaactcaagagctaatcatgaacagcttcaaaacaatcgatggaagaggcgtgaacgttgcaatcgcaggcggtgcttgtattacgattcagtatgtgacgaatattatcatccatgggattaatgtacatgattgtagaagaactggtaatgctatggttcgaagctcgccgtcgcattatgggtggaggactatggcggatggtgatgctatatcgatatttggatcgagtcatatttggattgatcataactctttgtctaattgtgctgatggtttgattgatgctattatgggatctactgctattactatctccaataactacatgactcaccacaacgaggttatgttgatggggcatagtgattcgtacactagagacaagttgatgcaagtgacaatagcatataaccattttggggaagggcttatacagagaatgccgaggtgtagacatggttatttccatgttgtaaacaatgattatactcattgggtaatgtatgcaattggtggaagtgctaaccctactatcaatagtcaaggcaatcgtttccttgccccgggcaaccctttcgccaaagaggtgacaaagagggtaggttcatggcaaggggaatggaagcaatggaactggagatctcaaggagacctaatgctcaacggtgcctacttcactaaatctggagctgctgctcctgcaagctatgccagagcctctagcttgggagctaaaccagcttctgtagtaagtatgcttacctacagctccggtgcccttaaatgcaggatcggtatgcggtgttag

SEQ ID NO: 876 - protein, 440 aa, Arabidopsis thaliana
MVIFSRSFLALSTTLIILALCINSSTMAQETEDLNSHSSSNSSTANKLPNDDGAWNEHAVKNPEEVAAMVDMKIKNSTERRRLGFFSCATGNPIDDCWRCDRNWHLRRKRLANCAIGFGRNAIGGRDGRYYVVTDPSDHDAVNPRPGTLRHAVIQDRPLWIVFKRDMVITLTQELIMNSFKTIDGRGVNVAIAGGACITIQYVTNIIIHGINVHDCRRTGNAMVRSSPSHYGWRTMADGDAISIFGSSHIWIDHNSLSNCADGLIDAIMGSTAITISNNYMTHHNEVMLMGHSDSYTRDKLMQVTIAYNHFGEGLIQRMPRCRHGYFHVVNNDYTHWVMYAIGGSANPTINSQGNRFLAPGNPFAKEVTKRVGSWQGEWKQWNWRSQGDLMLNGAYFTKSGAAAPASYARASSLGAKPASVVSMLTYSSGALKCRIGMRC

SEQ ID NO: 877 - DNA, 1635 bp, Arabidopsis thaliana
  CDS (131)..(1582)
ctcctcagtaaccagagagagaagaagaagaacaacaagccatgtcttaactcttaactaatctcttcttctccctccatttcaccaaccaaaaaccctaaaatccttaaaatcacaagtttcttcagcaatgatgcttcaaagaagctgcattgtacttttcttctctctttttctgttggttccacaaatggttttctcgatgctcaacagaactcttcttctcataccacatcctgacccggaactagtcgcttatcaagttcagtggaaagtaaatgcatctataacaaggcgtcaagctctagacacgacggaccaggccggttcgaccccgtgtatcaccggtaacccaatcgatgactgttggaaatgtgacccaaactggcccaataacagacaaggtctagcagattgtggtatcgggttcggacagtacgcgttgggaggcaaaggtggtcagttttactttgtcactgattcttccgacgatgatgccgtcaaccctaaaccgggcactctcagatatggggtgatacaagaagagccattgtggatagtgttcccaagcaacatgatgattaaactaaagcaagagctaatattcaatagttacaagacacttgatgggagaggagctaatgttcacattgttggtggtggctgcatcactcttcaatatgtctccaatatcatcattcacaacatccatatccaccattgttaccaatccgggaatactaacgtgcggtcaagtccaacgcactatgggttcagaacgaaatcggacggtgatggtatctctatattcggatcaaaggacatttggatcgaccattgttctctatcgagatgcaaggacggtctgatagatgcggtaatgggttccacaggaataactatatcgaacaacttcttctctcaccataatgaagtcatgcttcttggtcacagcgaccactatgaaccagacagtggcatgcaggtaacaattgcgtttaatcactttggagagaaattgatacaaaggatgccgaggtgtcgacgtggatatatccatgtggttaataacgattttactcaatgggaaatgtatgccattggcggtagcggtaacccgactattaacagtcagggtaaccgctacaccgccccaaccaacccgtttgccaaggaggtgacaaagagagtggaaacaccggatggtgattggaaagggtggaattggagatcggagggggacattttggtgaatggagccttcttcgtggcatccggggaaggtgcggaaatgaggtatgagaaggcatatagcgtcgagcctaaatccgcctcattcatcacccaaatcacatttcactctggtgttcttggcgttggtggcaggaataacaatctggggatgtggactactactggatcggaaggtactagcggtttagattcttataatgactataccgatgaaatgtctggcgctggttcaaccaaccggttatctttttcagttcttgttttcttgctaagttcgatatcatatttggtcgtgttcacttcttcaacccaaatgtttatgttgtaacatgaattgaatttacctattttatcaaggaacaagcaaaaagttgtttccat

SEQ ID NO: 878 - protein, 483 aa, Arabidopsis thaliana
MMLQRSCIVLFFSLFLLVPQMVFSMLNRTLLLIPHPDPELVAYQVQWKVNASITRRQALDTTDQAGSTPCITGNPIDDCWKCDPNWPNNRQGLADCGIGFGQYALGGKGGQFYFVTDSSDDDAVNPKPGTLRYGVIQEEPLWIVFPSNMMIKLKQELIFNSYKTLDGRGANVHIVGGGCITLQYVSNIIIHNIHIHHCYQSGNTNVRSSPTHYGFRTKSDGDGISIFGSKDIWIDHCSLSRCKDGLIDAVMGSTGITISNNFFSHHNEVMLLGHSDHYEPDSGMQVTIAFNHFGEKLIQRMPRCRRGYIHVVNNDFTQWEMYAIGGSGNPTINSQGNRYTAPTNPFAKEVTKRVETPDGDWKGWNWRSEGDILVNGAFFVASGEGAEMRYEKAYSVEPKSASFITQITFHSGVLGVGGRNNNLGMWTTTGSEGTSGLDSYNDYTDEMSGAGSTNRLSFSVLVFLLSSISYLVVFTSSTQMFML

SEQ ID NO: 879 - DNA, 1257 bp, Arabidopsis thaliana
  CDS (1)..(1257)
atggtggtcgctagaacattgttctcaatctcagcaactctaatcatttttctagcactctttctccatgtaaatgctttatcagacggtgaatggcatgaacacgccgttaaagacccagaagaaatagcagcaatggtcgatatgagcatacgtaacagtacgtatcgtagaaagctagggttcttctcctcatgctcaacaggaaacccaatagatgattgttggcgatgcgataaaaaatggcatcgccgaagaaagcgattagcggattgcgcgatcggtttcggacgtaacgcagtcggaggccgtgatggacgttactacattgttactgatccatctgatcatgatccggttacaccaaaacccggtacactccggtacgctgttatacaagacgaaccgctatggatcgtctttaaacgtgacatggtcattactttaagccaagaactaatcatgaatagcttcaaaactatcgatggtcgtggtgtcaacgtgcatatagctggtggtgcatgtctcacggttcagtacgttacgaatattatcatccatgggataaatattcatgattgtaagcgaactggtaacgctatggttaggagttcggagagtcattatggttggagaacgatggcggatggtgatggtatttcgatttttggatctagtcatatttggattgatcataattctctttcgagttgtgctgatggattgatagacgcaattatgggatctactgctattaccatctctaataattatctcactcaccacaacgaggctattttgttggggcataccgattcatacaccagagacaaaatgatgcaagtaaccattgcatacaaccattttggagaaggtcttatacagagaatgccaaggtgcaggcatggatactttcacgtagtaaacaatgattacactcactgggaaatgtatgcaattggtggaagtgctaaccctaccatcaatagtcaaggaaaccggttccttgccccgggaaaccgtttcgccaaggaggtgacgaaacgggtaggtgcagggaaaggagaatggaacaattggaattggagatcccaaggagacttaatgctaaatggtgcctactttacttcatctggagctggagcttctgcaaattacgccagagcctctagtttggctgctaaatcatcttcccttgtaggtatgcttacctctagctcgggtgctttgaaatgcaggatcggtacactttgttaa

SEQ ID NO: 880 - protein, 418 aa, Arabidopsis thaliana
MVVARTLFSISATLIIFLALFLHVNALSDGEWHEHAVKDPEEIAAMVDMSIRNSTYRRKLGFFSSCSTGNPIDDCWRCDKKWHRRRKRLADCAIGFGRNAVGGRDGRYYIVTDPSDHDPVTPKPGTLRYAVIQDEPLWIVFKRDMVITLSQELIMNSFKTIDGRGVNVHIAGGACLTVQYVTNIIIHGINIHDCKRTGNAMVRSSESHYGWRTMADGDGISIFGSSHIWIDHNSLSSCADGLIDAIMGSTAITISNNYLTHHNEAILLGHTDSYTRDKMMQVTIAYNHFGEGLIQRMPRCRHGYFHVVNNDYTHWEMYAIGGSANPTINSQGNRFLAPGNRFAKEVTKRVGAGKGEWNNWNWRSQGDLMLNGAYFTSSGAGASANYARASSLAAKSSSLVGMLTSSSGALKCRIGTLC

SEQ ID NO: 881 - DNA, 1413 bp, Arabidopsis thaliana
  CDS (1)..(1413)
atggcgtcgtcttctcagaaactgatcagtgtttgtgtcgctgtgctcgtcgtcttagctctcacggcgatgattttccggaacagtgaaatctctctctctaggaagctgaaaacagaggtgattcagagctcaaatagctcaacaatggcggcgataaggaagctgaaaacagaggagtttcagagcttaaacagctcaacaatggcggcgacaaggcttgatggtgaaccacaacaacaacaacacgccgttgctgatgatccagatatggttgctgatgaagtcgctaagcttgttcaaatgagtgaacagaacaggacagcaagaaggaagctaggattcttctcatgtggaactggtaatccaattgatgactgttggcgttgtgaccgtaactggcacaagaaccgtaaacgccttgcggattgtggcattggttttggaagaaacgcaattggtggtcgtgatggacgcttctacattgttactgacccgactgatgaagacgttgttaatcccaaacctggtactctacgccatgctgtcatccaggaggagcctctgtggattgtgttcaaaagggatatggtgatagagctgaaacaggagctgatcatgaatagtttcaagaccattgatgcccgtggctccaacgtccatatagccaatggtgcttgcatcaccatccagtttatcaccaatgtcatcattcatggtcttcacattcatgattgcaagcctactggaaatgcaatggttagaagctcgccatctcactttggttggaggacaatggctgatggtgatgctgtctctatttttggatcatctcatatctggattgatcataactctctctctcactgtgctgatggccttgtcgatgctgtcatgggttctactgctattaccgtttccaataaccactttacccaccacaatgaggtgatgttgcttgggcatagtgactcgtacacaaaggacaagctgatgcaagtaaccattgcttacaaccattttggagaaggactggttcagagaatgccaaggtgcagacatgggtacttccatgtggttaacaacgactacacacattgggagatgtacgccattggtgggagtgcagagccaaccatcaacagtcaaggaaacagatatgctgctcccatggaccgcttcgccaaagaggtgacaaaaagagtagagacagatgcaagcgagtggaagaagtggaattggagatcggaaggagaccttctactgaatggagcattcttcaggccatcaggagcaggagcatctgctagctatggacgagcctcaagcttagcagctaaaccatcatctatggtcgacactattacctctactgcaggagcactaggttgccgtaagggaagaccttgctag

SEQ ID NO: 882 - protein, 470 aa, Arabidopsis thaliana
MASSSQKLISVCVAVLVVLALTAMIFRNSEISLSRKLKTEVIQSSNSSTMAAIRKLKTEEFQSLNSSTMAATRLDGEPQQQQHAVADDPDMVADEVAKLVQMSEQNRTARRKLGFFSCGTGNPIDDCWRCDRNWHKNRKRLADCGIGFGRNAIGGRDGRFYIVTDPTDEDVVNPKPGTLRHAVIQEEPLWIVFKRDMVIELKQELIMNSFKTIDARGSNVHIANGACITIQFITNVIIHGLHIHDCKPTGNAMVRSSPSHFGWRTMADGDAVSIFGSSHIWIDHNSLSHCADGLVDAVMGSTAITVSNNHFTHHNEVMLLGHSDSYTKDKLMQVTIAYNHFGEGLVQRMPRCRHGYFHVVNNDYTHWEMYAIGGSAEPTINSQGNRYAAPMDRFAKEVTKRVETDASEWKKWNWRSEGDLLLNGAFFRPSGAGASASYGRASSLAAKPSSMVDTITSTAGALGCRKGRPC

SEQ ID NO: 883 - DNA, 1384 bp, Arabidopsis thaliana
  CDS (75)..(1301)
ccttcgcttccctcttctctcaccacaatccgagagagagacagtactgtaatccaagtgagagagagagagaaatgaaaatgcagacgaagaagctctttatcaccattgtctcctttcttctctatgctccattgttcttatcttcaccagttcctgaccctgaatctgtcgttgaagaagttcacaagagcattaatgcgtcggttgcaggaagaaggaagttaggttacctctcatgtacgaccggtaacccaatcgacgactgttggcgttgtgaccctcactgggagcaacaccgtcaacgtctcgctgactgcgccattggattcggcaaaaacgccatcggtggccgtgacggtcggatctacgtggtcaccgactcaggaaacgacaacccagttagccccaagcccggaactttaagacacgccgtggtccaagacgagccactctggatcatcttccaacgagacatgacgattcagctcaaagaagagctaatcatgaactcattcaagaccatcgatggccgtggtgcttccgtacacatctctggtgggccttgtataacgatccagtacgtgaccaacattatcatccatgggattcatatccatgattgcaagcaaggtggcaacgctatggtgcggagctctccacggcatttcgggtggagaacgatatcggacggtgatggtgtctctatctttggaggaagtcatgtttgggttgaccattgttcgttctctaactgtgaagatggacttattgatgctatcatgggctcgacggctatcactttgtctaacaatcatatgacacatcatgataaggtcatgttgcttggtcatagtgatacttacagtcgtgacaagaatatgcaagttaccattgcttttaaccattttggtgaaggccttgtccaaagaatgcccaggtgtagacatggatacttccatgtggtgaacaatgactacacacattgggagatgtatgcgattggtggaagtgctaatcctacaatcaatagtcaagggaacagatttttggcacccaatatcagatttagcaaagaagtgactaagcatgaggacgcgcctgagagcgagtggaagagatggaattggagatcttccggagatttgttgctaaacggtgcgttttttactccgtctggtggtgcagcctcgtctagctatgcaaaggcttcgagccttggggctaaaccgtcttctctagttggaccattgacgtctacttctggtgcactgaattgccgtaaaggttcccgttgctgattgtggcttagtggtcacacttaagtttttaccccattattatataggaaaaggcaattaaagccaccaattaagggggatta

SEQ ID NO: 884 - protein, 408 aa, Arabidopsis thaliana
MKMQTKKLFITIVSFLLYAPLFLSSPVPDPESVVEEVHKSINASVAGRRKLGYLSCTTGNPIDDCWRCDPHWEQHRQRLADCAIGFGKNAIGGRDGRIYVVTDSGNDNPVSPKPGTLRHAVVQDEPLWIIFQRDMTIQLKEELIMNSFKTIDGRGASVHISGGPCITIQYVTNIIIHGIHIHDCKQGGNAMVRSSPRHFGWRTISDGDGVSIFGGSHVWVDHCSFSNCEDGLIDAIMGSTAITLSNNHMTHHDKVMLLGHSDTYSRDKNMQVTIAFNHFGEGLVQRMPRCRHGYFHVVNNDYTHWEMYAIGGSANPTINSQGNRFLAPNIRFSKEVTKHEDAPESEWKRWNWRSSGDLLLNGAFFTPSGGAASSSYAKASSLGAKPSSLVGPLTSTSGALNCRKGSRC

SEQ ID NO: 885 - DNA, 1401 bp, Lycopersicon esculentum
  CDS (53)..(1267)
tttactcaactcaacacaatatattcttttctacccccacaccattaaaaatatgtctactcttttcttcacattttccctccttcttctagcaccactactcgtaattagttcaatccaagatccagaacttgttgtacaagacgttcataggagcatcaatgcgtcattgacgaggaggaatttgggctatttatcgtgcggatcagggaatccaatcgatcgattgctggcgatgcaaccccaattgggaaaaaaatcgccagcgtttagctattgcgccattgggtttggaaagaatgctatcggaggaaaaaatggccgaatttacgtggttactgattcagggaacgatgaccccgtgaaccctaaacccggaaccctgagacatgctgttatacaagacgagcctttatggattattttcaaaagagatatggtcattcagctcaaacaagagcttgtcatgaactcttataagaccatagatggtcgtggtgcgagtgttcacatttcaggtggtccgtgcattacaatccaccataccagcaacattataatacacgggattaatatacacgattgtaaacagagtggtaacggcaacattagggactcaccaaaccattccggatggtgggatgtttctgatggtgatggtatttcaatttttggagggaaaaacatttgggtggaccattgttcgttgtctaattgccacgacggtttaattgatgcaattcacggatctacagcaatcacgatatctaacaactatttcactcatcatgacaaggtgatgttgttgggacatagtgattcttttacacaggacaaaggcatgcaagtcacagttgcttttaatcattttggtgaagggttggtgcaaagaatgccaaggtgcagacatggttacttccatgtggttaataatgactatactcactgggaaatgtatgccattggtggtagtgctgcacctactattaatagccaaggaaacagatttcttgctcccaatgaaaaataccgcaaagaggtgacaaagcatgaggatgcaccagaaagtcagtggagaagctggaactggagatcagaaggtgatttgatgttaaatggagcgtatttcaggcaaacaggggcaggtgcatcatcatcatctacttatgccagagcttcaagcttaagcgctaggccttcttctttagttggatcaattaccacaaatgccggtcctgttaactgcaaaaaaggctctcgctgctagtaaatttaaatccagtggctactaaatttatttcaaaatggagaatgtacgatgactagttgacgatagtgaaagaagtagtgttttaattaagctgaaaatggtgtacggaaaatatatggagaccatttcgc

SEQ ID NO: 886 - protein, 404 aa, Lycopersicon esculentum
MSTLFFTFSLLLLAPLLVISSIQDPELVVQDVHRSINASLTRRNLGYLSCGSGNPIDRLLAMQPQLGKKSPAFSYCAIGFGKNAIGGKNGRIYVVTDSGNDDPVNPKPGTLRHAVIQDEPLWIIFKRDMVIQLKQELVMNSYKTIDGRGASVHISGGPCITIHHTSNIIIHGINIHDCKQSGNGNIRDSPNHSGWWDVSDGDGISIFGGKNIWVDHCSLSNCHDGLIDAIHGSTAITISNNYFTHHDKVMLLGHSDSFTQDKGMQVTVAFNHFGEGLVQRMPRCRHGYFHVVNNDYTHWEMYAIGGSAAPTINSQGNRFLAPNEKYRKEVTKHEDAPESQWRSWNWRSEGDLMLNGAYFRQTGAGASSSSTYARASSLSARPSSLVGSITTNAGPVNCKKGSRC

SEQ ID NO: 887 - DNA, 1459 bp, Arabidopsis thaliana
  CDS (84)..(1379)
ctcactactctctctctctctctcctctgttctaattctctaggaacagagtaaaagactttggctcagcttctgcctctccaatggcggttcttccgacatggcttttagcaatgatgtgtttactcttcttcgtcggagctatggagaacactacacacgacaacatctcttctctccctagatccgacgaaaccgaatggaaccaacacgcagtgacgaatccagatgaagtagcggacgaagttctcgccttgacagaaatgagtgtgagaaaccataccgagaggaggaaactaggttactttacttgcggaacaggaaaccctatcgacgattgttggcgatgtgaccccaattggcacaagaaccgtaaacgcctagcggattgcggtatcggatttggaagaaacgcgatcggtggtcgtgatggacgattctacgtagtcactgacccaagagacgacaatccggttaaccctagaccggggactttacgtcacgccgtgatccaagaccgaccactatggatcgttttcaaacgtgacatggtgattcagctaaaacaagagcttatcgttaacagtttcaaaacgatcgatggacgtggcgcaaacgttcacattgctaacggtggttgcatcacgattcagtttgtgacgaatgtgatcgttcacggattgcatattcatgactgtaaaccaactggtaacgctatggtgagaagctcagagacgcattttgggtggaggacaatggcagatggtgacgcgatttcgatctttggatcgagtcatgtatggattgatcataactcgttgtcccattgcgctgatgggcttgtggacgcagtcatgggctcaaccgcgattaccatctctaacaaccacttaactcaccataacgaggttatgttgctaggacatagtgactcgtacatgagggacaaagctatgcaagtgaccattgcttacaatcattttggagtcggacttattcaaagaatgccgaggtgtcgacacgggtacttccatgttgttaacaacgactacactcactgggaaatgtacgcaataggtggtagcgcaaacccgacaatcaacagtcaaggaaaccgctatgccgccccaaaaaacccctttgctaaagaggtgacgaagagagtggacacaccggctagtcattggaaaggatggaattggagatcggaaggagatttgcttcagaacggtgcttacttcacttcttcaggagccgccgcgtctggcagctacgcacgtgcctccagcctttccgcgaaatcttcgtcattggtcggacacattacttccgacgctggagctctaccttgtcgcagaggacgtcaatgttcctcatagttactaccccaccaccaaaattcaaaaccatcttccattatattcagacaaaagtgtaaatttacacacatttgtcattt

SEQ ID NO: 888 - protein, 431 aa, Arabidopsis thaliana
MAVLPTWLLAMMCLLFFVGAMENTTHDNISSLPRSDETEWNQHAVTNPDEVADEVLALTEMSVRNHTERRKLGYFTCGTGNPIDDCWRCDPNWHKNRKRLADCGIGFGRNAIGGRDGRFYVVTDPRDDNPVNPRPGTLRHAVIQDRPLWIVFKRDMVIQLKQELIVNSFKTIDGRGANVHIANGGCITIQFVTNVIVHGLHIHDCKPTGNAMVRSSETHFGWRTMADGDAISIFGSSHVWIDHNSLSHCADGLVDAVMGSTAITISNNHLTHHNEVMLLGHSDSYMRDKAMQVTIAYNHFGVGLIQRMPRCRHGYFHVVNNDYTHWEMYAIGGSANPTINSQGNRYAAPKNPFAKEVTKRVDTPASHWKGWNWRSEGDLLQNGAYFTSSGAAASGSYARASSLSAKSSSLVGHITSDAGALPCRRGRQCSS

SEQ ID NO: 889 - DNA, 1525 bp, Arabidopsis thaliana
  CDS (104)..(1357)
aactcttttcatcttccttcttccttcttcttctttgaacacaaaaaaccgacaaaagcctctgtctcggacagagacaaagaaacagaacagagcaagaacaatggctgttacacaaatacttgtcgtctttgcttctgcattactcctatcaatgttcttcactggcgtcgattccacaaggtctaatgaaacatggcatgaacatgcagttgagaatccagaggaagtagctgccatggtggacatgagcattcgaaacagcacagcgagaagaagattaggatacttctcatgctcaaccggaaatccaatcgatgattgttggcgttgtgaccggagatggcaatcccggcgaaaacatctagccaattgcgcaatcgggttcggtcgcaatgcaatcggcggtagagacggtcgttactacgtagtgagtgatccaaacgacgataacccggttaaccctaaaccgggaacattacgtcacgcagtaattcaagaagaaccattatggatcgtctttaaacgtgacatggtcataacattaaaagaagaactaatcatgaacagtttcaaaacaatcgatggtcgtggcgtcaacgttcacatagctaatggtgcatgcatcacgattcagttcgtgactaacattatcattcatgggatacatattcatgattgtagaccaactggtaacgctatggttagaagctctccttcgcattatggttggagaactatggctgatggagatgggatttcgattttcgggtcgagtcatatttggattgatcataattcgctttcgaattgtgctgatgggcttattgatgctgttatggcttctactgctattactatctccaataattacttcacacaccacaatgaggttatgttattgggacatagtgatacctatacaagggataaggttatgcaagttacaatagcttataatcattttggtgaaggtcttattcagagaatgccgaggtgtaggcatggatattttcatgtagttaacaatgactatacacattgggaaatgtatgcgatcggtggcagtgcgagtcctaccattaacagccaaggaaatagatatctcgccccaagaaaccggtttgctaaagaggtgacaaagagagactatgcagggcaatggcaatggaggcattggaattggagatcagaaggagatctttttttaaacggagctttcttcacacgttctggatcaggtcttggagctagctacgctagagcttcaagtttagcagccaaatcatcatctcttgttggcgtcattacctacaatgccggtgctcttaattgcagaggtggtcgccggtgttaatagttactaaagtctatcttcttttggtttcttgcattatacatggcaatagcactattgaatgtcgaggcttgatttaaaattgcctcaactgtattataaagttgtaatgatttgtttcaccgccaattattgatgtatctataaaagcaaacaaagttggaactc

SEQ ID NO: 890 - protein, 417 aa, Arabidopsis thaliana
MAVTQILVVFASALLLSMFFTGVDSTRSNETWHEHAVENPEEVAAMVDMSIRNSTARRRLGYFSCSTGNPIDDCWRCDRRWQSRRKHLANCAIGFGRNAIGGRDGRYYVVSDPNDDNPVNPKPGTLRHAVIQEEPLWIVFKRDMVITLKEELIMNSFKTIDGRGVNVHIANGACITIQFVTNIIIHGIHIHDCRPTGNAMVRSSPSHYGWRTMADGDGISIFGSSHIWIDHNSLSNCADGLIDAVMASTAITISNNYFTHHNEVMLLGHSDTYTRDKVMQVTIAYNHFGEGLIQRMPRCRHGYFHVVNNDYTHWEMYAIGGSASPTINSQGNRYLAPRNRFAKEVTKRDYAGQWQWRHWNWRSEGDLFLNGAFFTRSGSGLGASYARASSLAAKSSSLVGVITYNAGALNCRGGRRC

SEQ ID NO: 891 - DNA, 1179 bp, Arabidopsis thaliana
  CDS (1)..(1179)
atgtcaattgtatgtacgtttttcttgtttctcttaaacacttcttttgcgtttgcatttgcgattcctaaaccgccaatagtaaggagactatcaacgacagtgacatcaaattcaacagcgtcttcttgctcagccaatggaaatccaatcgatgagtgttggagatgcgacgaaaactggaaggacaaccgcaaaaacctcgcggattgcgcggttggattcggacgcgactcaattggcggtagagccggggagttctacacggtgactgattcaggagacgacaatcctctaaatccaactccaggtacattacggtacgctgcgacacaagatcaacctctatggatcatttttgatcgagacatggtaatacaactaaaacaagatcttcaagtagcttcatacaaaaccattgatggtagaggaaataacgtacaaatagcttatggaccgtgtttaactttatataaagttagtaacattattataaacaatctttatattcacgattgtgttcccgtgaaacggaatgctttatcgtcgttgggaggatactcggatggagatggaatatcgatattcgagtctcgagatatttggattgatcattgtacgttagagaaatgttacgatgggcttattgatgcggtgaatggatccacggatataacgatttcgaatagttacatgttgaatcataatgaagtcatgcttttgggccatagtgatgagtattccggtgatcgggatatgcgagttacgatcgcgtttaactattttggtgaaggacttgtccaaagaatgccaaggtgtaggcatggatattttcacatagtgaataacatttatagagactggaagatgtatgctattggtggaagtgctaatccaacgatctttagccaaggaaatgttttcatagcttccaataatcagttcaccaaggaggttacaaagcgagagagtgcagatggagacgaagaatggaaggaatggaactggaaatcagaaggagacgaaatggttaacggagctttctttacaccgtcagggaaagaggattctccgagctacgcgaaattttcgagtatggtagctcgaccagcttcacttctcaagaccacacatccatcagtaggtgttcttagttgcgaaattgaccaagcttgttaa

SEQ ID NO: 892 - protein, 392 aa, Arabidopsis thaliana
MSIVCTFFLFLLNTSFAFAFAIPKPPIVRRLSTTVTSNSTASSCSANGNPIDECWRCDENWKDNRKNLADCAVGFGRDSIGGRAGEFYTVTDSGDDNPLNPTPGTLRYAATQDQPLWIIFDRDMVIQLKQDLQVASYKTIDGRGNNVQIAYGPCLTLYKVSNIIINNLYIHDCVPVKRNALSSLGGYSDGDGISIFESRDIWIDHCTLEKCYDGLIDAVNGSTDITISNSYMLNHNEVMLLGHSDEYSGDRDMRVTIAFNYFGEGLVQRMPRCRHGYFHIVNNIYRDWKMYAIGGSANPTIFSQGNVFIASNNQFTKEVTKRESADGDEEWKEWNWKSEGDEMVNGAFFTPSGKEDSPSYAKFSSMVARPASLLKTTHPSVGVLSCEIDQAC

SEQ ID NO: 893 - DNA, 1299 bp, Arabidopsis thaliana
  CDS (1)..(1299)
atgtttcgtcccaattctcttttaataccttcaaatttatcaacaacaaaaagccaaagaaacacaatgctaaattcttcatatctatccttcgcacttatctttttctgctgcattttgttctccgctctcgcttcgtctttgcccgtttccgaccctgagcttgttgtcgaggaagtacacagaaaaataaacgagtccatatcaagaaggaagctagggttcttctcgtgcgggagtggtaatccaatcgatgattgttggcgatgcgacaaggattgggagaaaaaccgaaaacggttagcagactgtggtatcggttttggcaagaacgctattggcggtcgtgatggtgaaatctatgtggtcacggatccaggaaacgatgatccagtaaaccctagaccgggaacactaagatacgcagtcattcaagatgaaccgctatggatcatttttaagcgagacatgacgatccaactaaaagaagaactcatcatgaattctttcaaaaccctagacggacgaggagcctccgtacacatctccggtgggccatgtataaccatacaatatgtaaccaacatcatcatccatggtttacacatacatgactgcaagcaaggtgggaatacttacgtacgtgactcaccagagcattacggatatagaacggtatccgacggtgacggtgtgtcaatattcggtggaagccacgtgtgggttgatcattgctcgctatcgaattgcaacgacgggttaattgatgcaattcgtggatcaacggctataacgatctcgaacaattatttgacgcatcataataaggttatgttattgggacacagtgatacgtacgaacaagacaagaacatgcaagtcactatcgcttttaaccattttggagaaggcctcgtccaaagaatgccaaggtgtagacatggatatttccatgtggtgaacaatgactatacacattgggaaatgtatgcaattggaggaagtgctaatcctaccatcaactctcaaggcaaccgttttcttgctcctgatgactcatctagcaaagaggtaacaaagcacgaggatgcgccggaagacgaatggagaaattggaattggagatctgaaggagatctactgcttaatggtgcattcttcacctattctggtgctggaccagctaaatcatcaagctattcaaaagcttcgagtctagccgcgagaccgtcctctcatgttggtgagataactatagcctcgggtgcactcagctgcaaaaggggttctcattgttga

SEQ ID NO: 894 - protein, 432 aa, Arabidopsis thaliana
MFRPNSLLIPSNLSTTKSQRNTMLNSSYLSFALIFFCCILFSALASSLPVSDPELVVEEVHRKINESISRRKLGFFSCGSGNPIDDCWRCDKDWEKNRKRLADCGIGFGKNAIGGRDGEIYVVTDPGNDDPVNPRPGTLRYAVIQDEPLWIIFKRDMTIQLKEELIMNSFKTLDGRGASVHISGGPCITIQYVTNIIIHGLHIHDCKQGGNTYVRDSPEHYGYRTVSDGDGVSIFGGSHVWVDHCSLSNCNDGLIDAIRGSTAITISNNYLTHHNKVMLLGHSDTYEQDKNMQVTIAFNHFGEGLVQRMPRCRHGYFHVVNNDYTHWEMYAIGGSANPTINSQGNRFLAPDDSSSKEVTKHEDAPEDEWRNWNWRSEGDLLLNGAFFTYSGAGPAKSSSYSKASSLAARPSSHVGEITIASGALSCKRGSHC

SEQ ID NO: 895 - DNA, 1227 bp, Arabidopsis thaliana
  CDS (1)..(1227)
atgagaatgacacttgttcacttgtctctctccctcttctcatgtctcctccttgtcctttctccgaccttcattgcctccactcccgtctccgaacccgaactcgtagttcaagaagttaacgaaaagattaatgcgtctaggaggaatctaggcgtgctctcatgtgggaccggaaatccaattgacgactgttggagatgcgacccgaaatgggagaaaaaccgacaacggttagccgattgcgcgatcgggtttggcaaacacgcaatcggtggtcgtgacggtaaaatctacgtggtgactgactcgagtgacaaagacgtggttaaccctaaacccggaacccttagacacgcggtgatccaagacgagccactatggatcatcttcgcgcgtgacatggtcataaaactaaaagaagagctgattatgaactctttcaagactatagacggccgtggagcgagcgtccacattgctggtggcgcgtgtatcaccgtccagtacgtgaccaacatcatcatccacggtgttaacatccatgactgtaaaagaaaggggaatgcttacgttagagactctccgtcgcattatgggtggaggacagcgtctgacggtgacgccgtctcgatttttggtggctcccacgtgtgggtagaccattgctcgttgtccaactgcgctgacggtctgatagacgccattcatggatcaacggccattactatctctaataactatttgagtcaccacaataaagtcatgcttttgggacacagtgattcgtacacgagagacaagaacatgcaagtcaccattgcctttaatcactttggagaaggtcttgttcagagaatgccaagatgtagacatggatattttcatgtggtgaataatgattatacacattggcaaatgtatgcaattggtggaagtgcagctccaacgattaacagtcaaggcaataggtttcttgctccaaacgaccatgtctttaaagaggtgactaaatacgaagatgcaccacgaagcaaatggaagaaatggaattggagatcggaaggtgatttgttcctaaacggtgcgttttttacgccttcgggtggaggagcctcttcaagctatgctaaggcttcgagtttgtcggctagaccgtcctcattggtggcttcagtcacgtccaatgctggtgcactcttttgtagaaaaggatcacgatgttaa

SEQ ID NO: 896 - protein, 408 aa, Arabidopsis thaliana
MRMTLVHLSLSLFSCLLLVLSPTFIASTPVSEPELVVQEVNEKINASRRNLGVLSCGTGNPIDDCWRCDPKWEKNRQRLADCAIGFGKHAIGGRDGKIYVVTDSSDKDVVNPKPGTLRHAVIQDEPLWIIFARDMVIKLKEELIMNSFKTIDGRGASVHIAGGACITVQYVTNIIIHGVNIHDCKRKGNAYVRDSPSHYGWRTASDGDAVSIFGGSHVWVDHCSLSNCADGLIDAIHGSTAITISNNYLSHHNKVMLLGHSDSYTRDKNMQVTIAFNHFGEGLVQRMPRCRHGYFHVVNNDYTHWQMYAIGGSAAPTINSQGNRFLAPNDHVFKEVTKYEDAPRSKWKKWNWRSEGDLFLNGAFFTPSGGGASSSYAKASSLSARPSSLVASVTSNAGALFCRKGSRC

SEQ ID NO: 897 - DNA, 1673 bp, Arabidopsis thaliana
  CDS (178)..(1428)
aagataatgggaatggtcacacaatcttcttcttatattaacttctctctcccgtagcctttcttctactcttcttctcatattcctcttcctttttctttccttatatcgagaaaagcctctgcctcatatagagataactaaacagaacagagcaagaactatacagccataacaatggctgtcacaaaacttattctctttgcttctgcattacttctaacagctctatttatcggcgttaatgcatccaggtccaatgaaacatggcatgaacatgcagttgagaacccagatgaagtcgctgccatggtggacatgagcattcgaaacagcacagagcggagaagattaggttacttctcctgcgccaccggcaacccaatcgacgattgctggcgttgcgaccgcaaatggcagctccgtcgcaaacgtttagccgattgctcaatcggatttggccgcaacgcaatcggaggccgcgacggtcgtttctacgtcgtaaccgaccctggagacgacgatcccgttaatcccataccgggaacactccgtcacgccgtgattcaagacgaaccactctggatcatcttcaaacgcgacatggttataaccttgaagcaagagctgatcatgaacagcttcaaaaccatcgatggtcgtggtgtcaatgttcacatcgctaatggagcttgtctcacgattcaatacgttacgaacattattgtccatgggattcatgtccatgactgtaagcctacgggtaacgctatggttagaagctctccgtcccattatgggtttagatcaatggctgatggtgacgcgatctcgatttttggatcgagtcatatctggattgatcacaattcgctttctaattgtgctgatggacttgttgacgctgttatgagctccaccgccattactgtctcaaacaatttcttcacccaccacaatgaggttatgttgttggggcatagtgattcatacacaagagacaaggtgatgcaagttacaattgcttacaaccattttggtgaaggtttaatccagagaatgccaagatgtaggcatggatatttccatgtagttaacaatgactacactcattgggaaatgtatgcaattggtggtagtgctggtccaaccatcaacagtcagggcaatcgatttcttgctccagtcaacccatttgctaaggaggtgactaagagagagtacacaggagaatcgaaatggaagcactggaattggagatcagaaggagatcttttcttaaacggagcatttttcacacgttctggagctggagctggagccaactatgccagagcttcgagtttatcagccaaatcatcctcactcgtcggcaccatgacctcttactcaggtgctcttaactgcagagccggtcgtcgatgttaattgatcaagaatcagaagaaaaaaaacctttttttggttgtgcagtagtcgacaagtttacccgtatcaggccctatgtcttttcttcttcacttttttttttttgttttcactcttggggtctcttgcgatatatgcttcctagtggatgcggaggcctaatttaaacggcttcaactgtaatataaagttgtatgattaattcttttcacctctattgatataaagttgtttcattagtcgtt

SEQ ID NO: 898 - protein, 416 aa, Arabidopsis thaliana
MAVTKLILFASALLLTALFIGVNASRSNETWHEHAVENPDEVAAMVDMSIRNSTERRRLGYFSCATGNPIDDCWRCDRKWQLRRKRLADCSIGFGRNAIGGRDGRFYVVTDPGDDDPVNPIPGTLRHAVIQDEPLWIIFKRDMVITLKQELIMNSFKTIDGRGVNVHIANGACLTIQYVTNIIVHGIHVHDCKPTGNAMVRSSPSHYGFRSMADGDAISIFGSSHIWIDHNSLSNCADGLVDAVMSSTAITVSNNFFTHHNEVMLLGHSDSYTRDKVMQVTIAYNHFGEGLIQRMPRCRHGYFHVVNNDYTHWEMYAIGGSAGPTINSQGNRFLAPVNPFAKEVTKREYTGESKWKHWNWRSEGDLFLNGAFFTRSGAGAGANYARASSLSAKSSSLVGTMTSYSGALNCRAGRRC

SEQ ID NO: 899 - DNA, 1481 bp, Arabidopsis thaliana
  CDS (22)..(1380)
cattttccctttgtttgcacaatggcgacgtcatctctgaaactgaccagtgcttgtttcgtcttgctcttcatcttcgttggctgcgttctcacagcaacaaatctccgaaacaacgaaatctctcgatcgaggaagctgaaaacagaggattcaaagagctttaacagttcaccaatgacgactaggcttgatggtgtagtagagttgaatgaacacgcagttactgatccagacaaagttgcccatgaagtctctaaccttattcacatgagtgaacagaacatcactgcaaggaggaagcttggcttcttttcatgtggaaatggcaatctaatagatgattgttggcgttgcgaccgcaactggaacaagaaccgtaaacacctagcggattgtgggatgggttttggaagtaaagcgtttggtggtcgtaatggaagttactatgtggtcactgaccatagtgatgatgacgttgtgaatccaaagccaggaactttacgtcatgccgtgatccaggttgaaccattatggatcatctttaaaagagacatggtgataaagttgaaacaagaactgatcatgaacagtttcaaaaccattgatgctcgtggtgccaatgtccacattgccaatggtgcttgcataacaatccaaaatataaccaatgttatcgttcatggcttgcacattcacgattgcaagagaaccgggaatgtaactgtcagaagctcgccaagtcaggccgggtttaggggaacggctgatggtgatgctattaatatatttgggtcaagtcatatttggatcgaccacaactcgctctctaactgtactgatggtcttgttgatgttgtaaacggttccactgccattaccatttccaataaccatttcactcaccacgatgaggtgatgttgctagggcacaatgattcgtacacacgagacaagatgatgcaagtgacagttgcgtataaccattttggagaagggctcatacagagaatgccaaggtgcaggcatggttatttccatgtggttaacaacgattacacacattggaaaatgtatgctattggaggaagtgcaaacccaacgataaacagtcaaggcaatagatttgctgctcccaaaaaccactccgccaaggaggtgacaaaaagattagacacaaaaggtaatgagtggatggagtggaattggagatcagaaaaagaccttctagtgaatggagcgttttttacaccatcaggtgaaggagcatcaggagactcacaaactttaagcttaccggctaaaccagcttcaatggtcgacgcaatcactgctagtgcaggtgcacttagttgccgtagaggcaaaccttgctactagtaaaacattactctctcaacccattagtagtttcagtatacaaaaacaccaacctaacccctttcacacgtattagcaagtgtgcaaagctttatacttat

SEQ ID NO: 900 - protein, 452 aa, Arabidopsis thaliana
MATSSLKLTSACFVLLFIFVGCVLTATNLRNNEISRSRKLKTEDSKSFNSSPMTTRLDGVVELNEHAVTDPDKVAHEVSNLIHMSEQNITARRKLGFFSCGNGNLIDDCWRCDRNWNKNRKHLADCGMGFGSKAFGGRNGSYYVVTDHSDDDVVNPKPGTLRHAVIQVEPLWIIFKRDMVIKLKQELIMNSFKTIDARGANVHIANGACITIQNITNVIVHGLHIHDCKRTGNVTVRSSPSQAGFRGTADGDAINIFGSSHIWIDHNSLSNCTDGLVDVVNGSTAITISNNHFTHHDEVMLLGHNDSYTRDKMMQVTVAYNHFGEGLIQRMPRCRHGYFHVVNNDYTHWKMYAIGGSANPTINSQGNRFAAPKNHSAKEVTKRLDTKGNEWMEWNWRSEKDLLVNGAFFTPSGEGASGDSQTLSLPAKPASMVDAITASAGALSCRRGKPCY

SEQ ID NO: 901 - DNA, 1305 bp, Lilium longiflorum
  CDS (1)..(1305)
atgaaagccgctcagttcttcctctactctctcctcttctttgcttcagcggccttatcaagcgcgaacatcgccgagttcgacgagtactggcagaagaaatccaaggtcgcacaggccaaggccaagaaggcatatacacctcacccagaggaggtgaccaaccacttcaacaaggctgtccacagttctttcgagggtaacagcaccagaagaaacctgcgaaccaataagctgggtcagtgcttagccactaaccctatcgaccgctgctggcggtgcaagaagaactggtctgccaatcgcaaggacctcgttaagtgtgtcaagggctttgggcggaaaaccaccggtggtgccgcaggtgaaatctacgttgttaccgacccatctgacgacagtctaacggacccaaagtttggtactctccgatggggtgttatccaagaccggcctctctggatcatttttggcaagagcatggtcatccgtctcaaacaggagctcatcatcaacaatgacaagaccatcgatggtcgtggcgccaatgtccaaattgccggtggagcccaactcaccgtccaattcgtgcacaatgtcatcatccacggtatccacatccacgatatcaagcccggggaggggggtctcatccgtgactccgagaaacatagtgggataaggaccaggagcgatggcgacggtatctcgattattggatcatcaaatatctggatcgaccatgtctcgttggcccgatgctctgatggactcattgatgtcatcttaggctccactgccatcacgatttcaaattgccacttaaccgagcatgacgatgttatgcttctgggcgctagcgatacctacacacaagatgagatcatgcaagttacggtggccttcaaccacttcggaagaggtctcgtgcagaggatgccaaggtgccgttatggatttgtgcatgtcgtgaacaacgactacactcactggattatgtatgcggtaggaggaagccagcacccaacaatcatcagccaaggcaatcgctacatcgctccccatatcgaagcagctaaagaggtgaccaagagggattatgcggagccagcagagtggagcaaatggacttggaagtcccagggtgacttgtttgtcagtggagccttctttgtagaatctggaggtccctttgagaacaagtactctaagaaggacttaatcaaagccaagccgggaacattcgtgcagaggctcacacgcttctcgggcgccctcaactgcaaggaaaatatggaatgctga

SEQ ID NO: 902 - protein, 434 aa, Lilium longiflorum
MKAAQFFLYSLLFFASAALSSANIAEFDEYWQKKSKVAQAKAKKAYTPHPEEVTNHFNKAVHSSFEGNSTRRNLRTNKLGQCLATNPIDRCWRCKKNWSANRKDLVKCVKGFGRKTTGGAAGEIYVVTDPSDDSLTDPKFGTLRWGVIQDRPLWIIFGKSMVIRLKQELIINNDKTIDGRGANVQIAGGAQLTVQFVHNVIIHGIHIHDIKPGEGGLIRDSEKHSGIRTRSDGDGISIIGSSNIWIDHVSLARCSDGLIDVILGSTAITISNCHLTEHDDVMLLGASDTYTQDEIMQVTVAFNHFGRGLVQRMPRCRYGFVHVVNNDYTHWIMYAVGGSQHPTIISQGNRYIAPHIEAAKEVTKRDYAEPAEWSKWTWKSQGDLFVSGAFFVESGGPFENKYSKKDLIKAKPGTFVQRLTRFSGALNCKENMEC

SEQ ID NO: 903 - DNA, 1401 bp, Zea mays
  CDS (1)..(1401)
atggcagcggcgggctcgtccgcggcgagggccaggagggcggggctcgcagccgccgccgccgcggcgctcctcgtcctcgtggtggtcgccgtcagcgcggcgctccctggcgggcgggtgagggtcctcgacggccttcggcaaaggagcacgtccgtggtggcgggaggcgcgaggcggtggctgcgggactcctccttgccggcggcgacgacgaggggcagggccgacggtgacgccggcgccggcgcggtggaagatccggaagccgtggccaacgacgtccacgcgtccatcaacaacatcacggcccggcgaaatctcgggtacctgtcgtgcgggacaggcaaccccatcgacgactgctggcgctgcgactcggactggcacaacaaccggaagcgcctcgccgactgtggcacggccggggtgggcaagccggagtggttatcggacggcaaggtgtacgtggtgaccgacccgagcgacgacgaccccgtgaacccgcgcgagggcaccctccgccacgccgtcatccaggaggagccgctgtggatcatcttcaagcgggacatggtgatcacgctcagggaggagctcatcatgaacagcttcaagaccatcgacggacgcggcgccaacgtgcacatcgccaatggtgcctgcatcaccatccagtacatcaccaacgtcatcatccacgggctccacatccacgactgcaggcccacggggaacgccatggtgcgcagctccccgagccactacggctggcgcaccatggccgacggggacggcgtgtccatcttcggttccagccacgtctgggtggaccactgctcgctctccaactgcgccgacggcctcatcgacgccatcatgggatccacggccatcactctgtccaacaactacttcacccaccacaacgaggtgatgctcctgggccacagtgactcctatgtgaaggacaaggcgatgcaggtcacgatagccttcaaccatttcggcgaaggcctcattcagagaatgccaaggtgccggcacggctacttccacgttgtgaacaacgactacacccactgggagatgtacgccattgggggcagcgcggagccaaccatcaacagccagggcaaccgctaccttgctccgacgaacccgttcgccaaggaggtgaccaagagggtggagactgcccagaccgtgtggaagagctggaactggaggtcagagggcgacctgctgctgaacggcgcctacttcaccccgtccggcgcgggcgcctcggccagctactcgcgcgcgtccagcctcggcgccaagtcgtcgtccatggtcggcaccatcacctcggacgccggcgcactgtcgtgccgcaagggcgcggcctgctag

SEQ ID NO: 904 - protein, 466 aa, Zea mays
MAAAGSSAARARRAGLAAAAAAALLVLVVVAVSAALPGGRVRVLDGLRQRSTSVVAGGARRWLRDSSLPAATTRGRADGDAGAGAVEDPEAVANDVHASINNITARRNLGYLSCGTGNPIDDCWRCDSDWHNNRKRLADCGTAGVGKPEWLSDGKVYVVTDPSDDDPVNPREGTLRHAVIQEEPLWIIFKRDMVITLREELIMNSFKTIDGRGANVHIANGACITIQYITNVIIHGLHIHDCRPTGNAMVRSSPSHYGWRTMADGDGVSIFGSSHVWVDHCSLSNCADGLIDAIMGSTAITLSNNYFTHHNEVMLLGHSDSYVKDKAMQVTIAFNHFGEGLIQRMPRCRHGYFHVVNNDYTHWEMYAIGGSAEPTINSQGNRYLAPTNPFAKEVTKRVETAQTVWKSWNWRSEGDLLLNGAYFTPSGAGASASYSRASSLGAKSSSMVGTITSDAGALSCRKGAAC

SEQ ID NO: 905 - DNA, 1434 bp, Glycine max
  CDS (1)..(1434)
atgctccaaacaacctgcattatactcttctctgttgtggccatatttttgcctcatggaacagcaatgctcaacctcactctcccaggacaacacccagaccctgaagccgttgctcgagaagttcataggaaagtgaatgcttcaatggcaagaagggaaatgctgggagtgtcagagaaagaggtggcatcatgtctaacagggaatcccatagatgattgttggaaatgtgacccagattgggccaacaacaggcagaggctagcagattgtgcaatagggttcgggcagaacgcaaagggaggaaaaggtggccaattttacatagtcactgattcctcagatgaggaccctgtgaacccaaaacctggaacacttagatatgcagtgatacagaacgagccactgtggatagtgttccccagtaacatgatgattaagctgtctcaagaactcatttttaatagctacaagaccattgatgggcgtggagctgacgtgcacattgtgggtggaggctgcattactcttcagtatattagcaatgtcattattcacaacattcacatccaccattgccatccctctggcaacgctaacgtgcggtcgagcccggaacattatgggtaccgcacggagtcggacggcgacgggatctccatcttcggctcgcgtgacatttggatcgaccactgcaccctctcccggtgcaaggacggcctgatcgatgcagtgatgggttccagcgctatcacgatctccaacaaccacttctcccaccacaatgacgtgatgctcctgtgccacagcgaccactacctcccagactccagcatgcaggtgaccattggcttcaaccactttcgggagggcctcgtccagcgcatgccgcgttgccgacgaggttacattcacgtggagaacaatgacttcacacgatgggagatgtacgccatcggcggcagtgcgggacccaccattaacagccagggaaaccgctacaccgcgccggaggatccgtacgcgaagcaggttacgaagaggctggatgccgaaaaaggggagtggagcgggtggaattggcggtccgaaggggatgttttgttgaatggcgcgttcttcgttgcttcgggagcagttgctgaacctaactatcagaacgcctacagcacccaacctaagaacgtggatcgcatttcgcttctcactatgtccgccggtgttctcggcgttgctagggacaataatctgggaatgtggatcagaggacccaacgatggcactgtatatttttcagattctggcccagaatacacagacgaaatgtcccggagtacaatgccgttgctaccttcacgtattttgattcttgtatctgcactcttatgcttcttaggtcatacaacaaccttaacaacactacccaattag

SEQ ID NO: 906 - protein, 477 aa, Glycine max; identical to SEQ ID NO: 838

SEQ ID NO: 907 - DNA, 27 bp, Artificial sequence
  primer
atagagctccacactcctctccgccac

SEQ ID NO: 908 - DNA, 31 bp, Artificial sequence
  primer
atacccgggttgccgtttttgcctccgagtg

SEQ ID NO: 909 - DNA, 24 bp, Artificial sequence
  primer
atgcttcttcaaaacttctccaac

SEQ ID NO: 910 - DNA, 25 bp, Artificial sequence
  primer
tcacaataatagagttgataacgac

SEQ ID NO: 911 - DNA, 27 bp, Artificial sequence
  primer
ataccatggcacactcctctccgccac

SEQ ID NO: 912 - DNA, 33 bp, Artificial sequence
  primer
atattaattaattgccgtttttgcctccgagtg

SEQ ID NO: 913 - DNA, 27 bp, Artificial sequence
  primer
ataggtacccacactcctctccgccac

SEQ ID NO: 914 - DNA, 31 bp, Artificial sequence
  primer
atagtcgacttgccgtttttgcctccgagtg

SEQ ID NO: 915 - protein, 444 aa, Artificial sequence
  consensus sequence
  Variant (2)..(3): Xaa in position 2 to 3 is any amino acid
  Variant (5)..(12): Xaa in position 5 to 12 is any amino acid
  Variant (13)..(17): Xaa in position 13 to 17 is any or no amino acid
  Variant (19)..(19): Xaa in position 19 is any amino acid
  Variant (20)..(20): Xaa in position 20 is any or no amino acid
  Variant (22)..(22): Xaa in position 22 is any amino acid
  Variant (24)..(25): Xaa in position 24 to 25 is any amino acid
  Variant (26)..(26): Xaa in position 26 is any or no amino acid
  Variant (28)..(28): Xaa in position 28 is any amino acid
  Variant (29)..(40): Xaa in position 29 to 40 is any or no amino acid
  Variant (42)..(42): Xaa in position 42 is any amino acid
  Variant (54)..(54): Xaa in position 54 is any amino acid
  Variant (56)..(57): Xaa in position 56 to 57 is any amino acid
  Variant (59)..(61): Xaa in position 59 to 61 is any amino acid
  Variant (63)..(64): Xaa in position 63 to 64 is any amino acid
  Variant (69)..(69): Xaa in position 69 is any amino acid
  Variant (70)..(70): Xaa in position 70 is any or no amino acid
  Variant (75)..(76): Xaa in position 75 to 76 is any amino acid
  Variant (78)..(78): Xaa in position 78 is any amino acid
  Variant (81)..(81): Xaa in position 81 is any amino acid
  Variant (82)..(82): Xaa in position 82 is any or no amino acid
  Variant (84)..(85): Xaa in position 84 to 85 is any amino acid
  Variant (91)..(92): Xaa in position 91 to 92 is any amino acid
  Variant (94)..(94): Xaa in position 94 is any amino acid
  Variant (96)..(96): Xaa in position 96 is any amino acid
  Variant (100)..(100): Xaa in position 100 is any amino acid
  Variant (106)..(106): Xaa in position 106 is any amino acid
  Variant (111)..(112): Xaa in position 111 to 112 is any amino acid
  Variant (117)..(117): Xaa in position 117 is any amino acid
  Variant (119)..(120): Xaa in position 119 to 120 is any amino acid
  Variant (123)..(123): Xaa in position 123 is any amino acid
  Variant (125)..(125): Xaa in position 125 is any amino acid
  Variant (127)..(128): Xaa in position 127 to 128 is any amino acid
  Variant (131)..(132): Xaa in position 131 to 132 is any amino acid
  Variant (135)..(135): Xaa in position 135 is any amino acid
  Variant (143)..(144): Xaa in position 143 to 144 is any amino acid
  Variant (148)..(149): Xaa in position 148 to 149 is any amino acid
  Variant (150)..(150): Xaa in position 150 is any or no amino acid
  Variant (152)..(152): Xaa in position 152 is any amino acid
  Variant (156)..(156): Xaa in position 156 is any amino acid
  Variant (158)..(160): Xaa in position 158 to 160 is any amino acid
  Variant (162)..(162): Xaa in position 162 is any amino acid
  Variant (167)..(167): Xaa in position 167 is any amino acid
  Variant (173)..(175): Xaa in position 173 to 175 is any amino acid
  Variant (178)..(179): Xaa in position 178 to 179 is any amino acid
  Variant (182)..(182): Xaa in position 182 is any amino acid
  Variant (185)..(185): Xaa in position 185 is any amino acid
  Variant (187)..(187): Xaa in position 187 is any amino acid
  Variant (189)..(189): Xaa in position 189 is any amino acid
  Variant (192)..(193): Xaa in position 192 to 193 is any amino acid
  Variant (197)..(198): Xaa in position 197 to 198 is any amino acid
  Variant (203)..(206): Xaa in position 203 to 206 is any amino acid
  Variant (207)..(207): Xaa in position 207 is any or no amino acid
  Variant (209)..(209): Xaa in position 209 is any amino acid
  Variant (212)..(212): Xaa in position 212 is any amino acid
  Variant (216)..(216): Xaa in position 216 is any amino acid
  Variant (218)..(218): Xaa in position 218 is any amino acid
  Variant (222)..(222): Xaa in position 222 is any amino acid
  Variant (225)..(226): Xaa in position 225 to 226 is any amino acid
  Variant (233)..(233): Xaa in position 233 is any amino acid
  Variant (237)..(239): Xaa in position 237 to 239 is any amino acid
  Variant (242)..(243): Xaa in position 242 to 243 is any amino acid
  Variant (252)..(252): Xaa in position 252 is any amino acid
  Variant (254)..(255): Xaa in position 254 to 255 is any amino acid
  Variant (257)..(258): Xaa in position 257 to 258 is any amino acid
  Variant (265)..(265): Xaa in position 265 is any amino acid
  Variant (273)..(273): Xaa in position 273 is any amino acid
  Variant (281)..(281): Xaa in position 281 is any amino acid
  Variant (295)..(295): Xaa in position 295 is any amino acid
  Variant (304)..(304): Xaa in position 304 is any amino acid
  Variant (314)..(315): Xaa in position 314 to 315 is any amino acid
  Variant (318)..(322): Xaa in position 318 to 322 is any amino acid
  Variant (328)..(335): Xaa in position 328 to 335 is any amino acid
  Variant (336)..(336): Xaa in position 336 is any or no amino acid
  Variant (338)..(339): Xaa in position 338 to 339 is any amino acid
  Variant (348)..(350): Xaa in position 348 to 350 is any amino acid
  Variant (354)..(354): Xaa in position 354 is any amino acid
  Variant (356)..(357): Xaa in position 356 to 357 is any amino acid
  Variant (360)..(364): Xaa in position 360 to 364 is any amino acid
  Variant (365)..(367): Xaa in position 365 to 367 is any or no amino acid
  Variant (369)..(369): Xaa in position 369 is any amino acid
  Variant (370)..(370): Xaa in position 370 is any or no amino acid
  Variant (374)..(381): Xaa in position 374 to 381 is any amino acid
  Variant (383)..(385): Xaa in position 383 to 385 is any amino acid
  Variant (387)..(389): Xaa in position 387 to 389 is any amino acid
  Variant (391)..(391): Xaa in position 391 is any amino acid
  Variant (393)..(393): Xaa in position 393 is any amino acid
  Variant (395)..(395): Xaa in position 395 is any amino acid
  Variant (396)..(440): Xaa in position 396 to 440 is any or no amino acid
  Variant (442)..(443): Xaa in position 442 to 443 is any amino acid
PXXVXXXXXXXXXXXXXRXXRXLXXXSXXXXXXXXXXXXXCXTGNPIDDCWRCXDXXWXXXRXXLADCXXIGFGXXAXGGXXGXXYVVTDXXDXDXVNPXPGTLRXAVIQXXPLWIXFXXDMXIXLXXELXXNSXKTIDGRGXXVHIXXXGXCITXQXXXNXIIHGXHIHDCXXXGNXXVRXSPXHXGXRTXXDGDXXSIFGXXXXXWXDHXSLSXCXDGLXDAXXGSTAITXSNNXXXHHXXVMLLGHSDXYXXDXXMQVTIAXNHFGEGLXQRMPRCRXGYFHVVNNDYTHWXMYAIGGSAXPTINSQGNRXXAPXXXXXKEVTKXXXXXXXXXWXXWNWRSEGDXXXNGAXFXXSGXXXXXXXXYXXASSXXXXXXXXVXXXTXXXGXLXCXXXXXXXXXXXXXXXXXXXXXXXXXXXXXXXXXXXXXXXXXXXXXXGXXC

SEQ ID NO: 916 - protein, 59 aa, Artificial sequence
  protein pattern
  Variant (7)..(7): Xaa in position 7 is Phe or Tyr
  Variant (12)..(13): Xaa in position 12 to 13 is any amino acid
  Variant (15)..(15): Xaa in position 15 is Ile or Val
  Variant (23)..(23): Xaa in position 23 is any amino acid
  Variant (26)..(26): Xaa in position 26 is Phe or Ile
  Variant (28)..(28): Xaa in position 28 is any or no amino acid
  Variant (33)..(33): Xaa in position 33 is Phe or Tyr
  Variant (35)..(35): Xaa in position 35 is any amino acid
  Variant (37)..(37): Xaa in position 37 is any amino acid
  Variant (39)..(39): Xaa in position 39 is Phe or Tyr
  Variant (45)..(45): Xaa in position 45 is Ala or Gly
  Variant (46)..(46): Xaa in position 46 is Ala, Asp, Glu, Gly, Asn or Ser
  Variant (50)..(50): Xaa in position 50 is any amino acid
  Variant (51)..(51): Xaa in position 51 is Cys or Ser
  Variant (56)..(56): Xaa in position 56 is Phe or Tyr
  Variant (57)..(57): Xaa in position 57 is any amino acid
MQVTIAXNHFGXXLXQRMPRCRXGYXHXVNNDXTXWXMXAIGGSXXPTIXXQGNRXXAP

SEQ ID NO: 917 - protein, 59 aa, Artificial sequence
  protein pattern
  Variant (3)..(3): Xaa in position 3 is Glu, Asn, Ser or Thr
  Variant (5)..(6): Xaa in position 5 to 6 is any amino acid
  Variant (7)..(7): Xaa in position 7 is Asp or Asn
  Variant (8)..(8): Xaa in position 8 is any amino acid
  Variant (9)..(9): Xaa in position 9 is Asp, Asn or Ser
  Variant (10)..(10): Xaa in position 10 is Ala, Leu, Pro or Val
  Variant (11)..(11): Xaa in position 11 is Ser, Thr or Val
  Variant (12)..(12): Xaa in position 12 is Asp, Asn or Ser
  Variant (14)..(15): Xaa in position 14 to 15 is any amino acid
  Variant (20)..(20): Xaa in position 20 is His, Trp or Tyr
  Variant (21)..(21): Xaa in position 21 is Ala or Gly
  Variant (22)..(22): Xaa in position 22 is Ala or Val
  Variant (23)..(23): Xaa in position 23 is any amino acid
  Variant (25)..(26): Xaa in position 25 to 26 is any amino acid
  Variant (31)..(31): Xaa in position 31 is any amino acid
  Variant (33)..(34): Xaa in position 33 to 34 is any amino acid
  Variant (35)..(35): Xaa in position 35 is Asp, Asn or Ser
  Variant (36)..(36): Xaa in position 36 is Ile or Met
  Variant (37)..(37): Xaa in position 37 is any amino acid
  Variant (39)..(39): Xaa in position 39 is any amino acid
  Variant (41)..(42): Xaa in position 41 to 42 is any amino acid
  Variant (45)..(46): Xaa in position 45 to 46 is Ile, Leu, Met or Val
  Variant (47)..(47): Xaa in position 47 is Asn or Thr
  Variant (48)..(48): Xaa in position 48 is Asp, Asn or Ser
  Variant (49)..(49): Xaa in position 49 is any amino acid
  Variant (52)..(52): Xaa in position 52 is Ile or Leu
  Variant (54)..(54): Xaa in position 54 is Ala or Gly
  Variant (57)..(57): Xaa in position 57 is Ala, Ser or Val
  Variant (58)..(58): Xaa in position 58 is Ala, Asn or Ser
VVXDXXXXXXXXPXXGTLRXXXXQXXPLWIXFXXXXXIXLXXELXXXXXKTXDXRGXXV

SEQ ID NO: 918 - protein, 41 aa, Artificial sequence
  protein pattern
  Variant (2)..(2): Xaa in position 2 is Ile or Val
  Variant (5)..(5): Xaa in position 5 is Cys or Asn
  Variant (6)..(6): Xaa in position 6 is Ser or Thr
  Variant (7)..(7): Xaa in position 7 is Phe, Leu or Met
  Variant (8)..(9): Xaa in position 8 to 9 is any amino acid
  Variant (11)..(11): Xaa in position 11 is any amino acid
  Variant (15)..(15): Xaa in position 15 is Ile or Val
  Variant (17)..(17): Xaa in position 17 is Ala, Pro or Val
  Variant (18)..(18): Xaa in position 18 is Ile or Val
  Variant (19)..(19): Xaa in position 19 is any amino acid
  Variant (20)..(20): Xaa in position 20 is Ala, Gly or Ser
  Variant (26)..(26): Xaa in position 26 is Ile, Leu or Val
  Variant (30)..(30): Xaa in position 30 is Phe, His or Tyr
  Variant (31)..(31): Xaa in position 31 is Phe, Leu or Met
  Variant (32)..(32): Xaa in position 32 is any amino acid
  Variant (35)..(35): Xaa in position 35 is Asp or Asn
  Variant (36)..(36): Xaa in position 36 is Glu or Lys
  Variant (37)..(37): Xaa in position 37 is Ala or Val
  Variant (38)..(38): Xaa in position 38 is Ile or Met
  Variant (40)..(40): Xaa in position 40 is Leu or Met
WXDHXXXXXCXDGLXDXXXXSTAITXSNNXXXHHXXXXLXG

SEQ ID NO: 919 - protein, 14 aa, Artificial sequence
  protein pattern
  Variant (2)..(2): Xaa in position 2 is any amino acid
  Variant (3)..(3): Xaa in position 3 is Ser or Thr
  Variant (14)..(14): Xaa in position 14 is Ala, Asp, Glu, Ser or Thr
CXXGNPIDDCWRCX

SEQ ID NO: 920 - protein, 25 aa, Artificial sequence
  protein pattern
  Variant (2)..(2): Xaa in position 2 is Ala, Asp, Gly or Ser
  Variant (3)..(3): Xaa in position 3 is Lys or Arg
  Variant (4)..(4): Xaa in position 4 is any amino acid
  Variant (5)..(5): Xaa in position 5 is Asp or Ser
  Variant (6)..(8): Xaa in position 6 to 8 is any amino acid
  Variant (9)..(9): Xaa in position 9 is Ala, Pro or Val
  Variant (10)..(10): Xaa in position 10 is Lys or Arg
  Variant (11)..(11): Xaa in position 11 is Ala, Pro or Ser
  Variant (12)..(12): Xaa in position 12 is Ala, Gly or Ser
  Variant (13)..(13): Xaa in position 13 is Ala, Ser or Thr
  Variant (14)..(14): Xaa in position 14 is any amino acid
  Variant (16)..(16): Xaa in position 16 is Ala, Asp, Gly, Gln or Ser
  Variant (17)..(17): Xaa in position 17 is any amino acid
  Variant (18)..(18): Xaa in position 18 is Ile, Leu, Met or Val
  Variant (20)..(21): Xaa in position 20 to 21 is any amino acid
  Variant (22)..(23): Xaa in position 22 to 23 is any or no amino acid
  Variant (25)..(25): Xaa in position 25 is Gly or Leu
YXXXXXXXXXXXXXVXXXTXXXXAX

SEQ ID NO: 921 - protein, 21 aa, Artificial sequence
  protein pattern
  Variant (2)..(2): Xaa in position 2 is any amino acid
  Variant (3)..(3): Xaa in position 3 is His, Lys or Arg
  Variant (6)..(6): Xaa in position 6 is Asp or Asn
  Variant (8)..(8): Xaa in position 8 is Ala, Gly or Ser
  Variant (13)..(14): Xaa in position 13 to 14 is any amino acid
  Variant (15)..(15): Xaa in position 15 is Ala or Thr
  Variant (16)..(16): Xaa in position 16 is any amino acid
  Variant (19)..(19): Xaa in position 19 is Lys or Arg
  Variant (20)..(20): Xaa in position 20 is any amino acid
RXXLAXCXIGFGXXXXGGXXG

SEQ ID NO: 922 - protein, 13 aa, Artificial sequence
  protein pattern
  Variant (4)..(4): Xaa in position 4 is Ala or Gly
  Variant (5)..(5): Xaa in position 5 is Ile or Val
  Variant (9)..(9): Xaa in position 9 is Ala, Glu, Gly or Asn
  Variant (10)..(10): Xaa in position 10 is Ala, Gly or Ser
  Variant (11)..(12): Xaa in position 11 to 12 is any amino acid
  Variant (13)..(13): Xaa in position 13 is Ile, Pro or Val
DGDXXSIFXXXXX

SEQ ID NO: 923 - DNA, 1530 bp, Arabidopsis thaliana
  CDS (1)..(1530)
atggcttctgttatctcttcctctccttttctatgcaaatcatcctccaagagtgatttggggatttcttcgtttcctaaatcttctcagatttcgattcatcgatgtcagaagaaatcgatctcacggaagattgtttccgttatggctcctcaaaaggatcggtctcctggaactacaggatcggtgaaaactgggatgacaatgacggagaagattctagctagagcttcggagaagtcattagtggttcctggtgataacatttgggttaatgttgatgttcttatgactcatgatgtttgtggtcctggtgcttttggtatcttcaagagagagtttggtgaaaaagccaaggtttgggatccggagaagattgttgtgattccggatcattatattttcactgctgataagcgtgcaaaccggaatgttgacatcatgagggagcattgcagggaacagaatattaagtatttctatgatatcactgaccttggaaattttaaggctaatcctgactacaaaggtgtttgccatgttgcacttgcacaagaaggtcattgcaggccaggagaggttttgttaggaacagactcacacacttgtactgctggagcatttggtcaatttgctacagggattggaaacactgatgcaggttttgtgttaggcactggaaaaatcctccttaaggttccaccaacgatgaggtttatcttggatggtgagatgcctagttatttgcaagcaaaggatctgattttacaaattattggtgaaatatctgttgctggtgcaacttacaagacgatggagttcagtggtacaactatcgaaagtctgagtatggaagaaagaatgacattgtgcaacatggttgtggaagctgggggaaagaatggtgtcatccctcctgatgcgacgacattaaattatgttgagaataggacatctgtaccatttgagccagtatatagtgatggaaatgcaagctttgtcgcagattatagatttgacgtgtcaaagctggagcctgtggtggctaagcctcattctcctgacaaccgagctctagctagagaatgcaaagacgtgaaaattgacagagtatacatcggttcttgtactggtgggaagacagaggattttatggctgcagctaaacttttccacgcagcaggaagaaaggtcaaagttccaactttccttgtcccggctactcagaaggtgtggatggatgtgtatgctctcccggtacctggagcaggtggaaagacatgtgcgcagatctttgaagaagctggctgtgacacaccagccagccctagctgtggtgcttgccttggtggcccagcagacacctacgctcgcttgaatgaacctcaagtgtgtgtctcaacgacaaacaggaacttccccggtcggatgggacacaaagaagggcaaatttacttagcgtctccttacactgctgcagcctcggctttaaccggccgtgtcgctgacccaagggagttcttgcagtag

SEQ ID NO: 924 - protein, 509 aa, Arabidopsis thaliana
MASVISSSPFLCKSSSKSDLGISSFPKSSQISIHRCQKKSISRKIVSVMAPQKDRSPGTTGSVKTGMTMTEKILARASEKSLVVPGDNIWVNVDVLMTHDVCGPGAFGIFKREFGEKAKVWDPEKIVVIPDHYIFTADKRANRNVDIMREHCREQNIKYFYDITDLGNFKANPDYKGVCHVALAQEGHCRPGEVLLGTDSHTCTAGAFGQFATGIGNTDAGFVLGTGKILLKVPPTMRFILDGEMPSYLQAKDLILQIIGEISVAGATYKTMEFSGTTIESLSMEERMTLCNMVVEAGGKNGVIPPDATTLNYVENRTSVPFEPVYSDGNASFVADYRFDVSKLEPVVAKPHSPDNRALARECKDVKIDRVYIGSCTGGKTEDFMAAAKLFHAAGRKVKVPTFLVPATQKVWMDVYALPVPGAGGKTCAQIFEEAGCDTPASPSCGACLGGPADTYARLNEPQVCVSTTNRNFPGRMGHKEGQIYLASPYTAAASALTGRVADPREFLQ

SEQ ID NO: 925 - DNA, 1515 bp, Brassica napus
  CDS (1)..(1515)
atggcttcctctgtaatctcttcatctcctttcctctgcaaatccgcccagaaggatttggggttccctaaaccgtcgcagatttcggttcacagatgtcagaagagagcgatttctcggaagatcgtctccgtcatggcgccgcagcgatcatccagcgccactggatcggtgaaaactgggatgacgatgacggagaagattcttgccaaggcagcagagaaatcacaagtggtgcctggtgataacatctgggttaacgttgacgttctcatgactcatgatgtctgtggccctggtgcttttggtatcttcaagagagagttcggtgaaaaagctaaggtttgggacccggagaagattgttgttattccagaccattacatcttcactactgataagcgtgccaaccgcaatgtcgacattatgagggaacattgcagggaacagaacatcaagtatttctatgatatcaccgaccttggagattttcgggctaatcctgactacaaaggtgtttgccatgtggcgcttgcacaagaaggtcattgcaggccaggagaggttttgttaggaacagactcgcacacatgtactgctggagcgtttggtcagtttgctacagggattggaaacaccgatgcaggatttgtgttaggcactggaaaaatcctccttaaggttccaccaacaatgaggtttatcttggatggtgaaatgcccagttatctgcaagcaaaggatctgattctacaaatcattggagaaatatctgttgctggtgcaacttacaagacgatggagttcagtggaacaactattgaaagtctaactatggaagaaagaatgacattgtgcaacatggttgtggaagctgggggaaagaatggtgtcatccctcctgatgcgacgacatttaattacgttgagaacaggacatctgtaccctttgagcccgtatatagtgatggaaatgcaagctttattgcagattatcgatttgacgtgtcaaagctggagcctgtggtggctaagcctcattctcctgacaacagggctctagcaagagaatgcaaagatgtgaaaattgacagagtatacattggttcttgtactggtgggaagactgaggattttatggctgcagctaaacttttccatgcagcaggaaagcaagtcaaagtcccaactttccttgtccccgctactcagaaggtgtggatggatgtgtatgccctccctgtgcctggagcaggtggaaagacgtgtgcgcagatattcaaagaagctggctgcgacacaccaaccagtcctagttgtggtgcctgccttggtggcccagctgacacctatgctcgcttgaatgaacctcaagtgtgtgtctcgacaacgaacagaaactttcctggtcggatgggacacaaagaagggcagatttacttggcttctccttacaccgctgcagcctcggctctgaccggccatgtcaccgacccaagagagttcttgcagtag

SEQ ID NO: 926 - protein, 504 aa, Brassica napus
MASSVISSSPFLCKSAQKDLGFPKPSQISVHRCQKRAISRKIVSVMAPQRSSSATGSVKTGMTMTEKILAKAAEKSQVVPGDNIWVNVDVLMTHDVCGPGAFGIFKREFGEKAKVWDPEKIVVIPDHYIFTTDKRANRNVDIMREHCREQNIKYFYDITDLGDFRANPDYKGVCHVALAQEGHCRPGEVLLGTDSHTCTAGAFGQFATGIGNTDAGFVLGTGKILLKVPPTMRFILDGEMPSYLQAKDLILQIIGEISVAGATYKTMEFSGTTIESLTMEERMTLCNMVVEAGGKNGVIPPDATTFNYVENRTSVPFEPVYSDGNASFIADYRFDVSKLEPVVAKPHSPDNRALARECKDVKIDRVYIGSCTGGKTEDFMAAAKLFHAAGKQVKVPTFLVPATQKVWMDVYALPVPGAGGKTCAQIFKEAGCDTPTSPSCGACLGGPADTYARLNEPQVCVSTTNRNFPGRMGHKEGQIYLASPYTAAASALTGHVTDPREFLQ

SEQ ID NO: 927 - DNA, 1969 bp, sorghum bicolor
  CDS (192)..(1715)
gcacgaggccacttcccacctcaccccggtgaccctcgcgggccccacacgccacggcggccaacaccacacgacacttgactccccaagcacacgcgtgagacgcgccgcaccaccccccgccccaaatccccgatccctccctcactctcgccgcgcccgccgggtgttcgacgcttcgccgccacgccatggcctcctccatctccgccgccgccaaggcctccacggccttcgcccacaagaaggagctcgccgcgccggcgcccgcgcagcaccgcgcgggctcgagccgccggaccaagccatgccgcgtgcgcgccgtcgcctcgcctgcgcgcgctccccgcgccccgtcgtccaccggctcggtgaagagcgcgatgacgatgacggagaagatcctggcgcgggcgtcggagcgcgcggcgctggagcccggggagaacgtgtgggtggacgtcgacgtgctcatgacgcacgacgtctgcggccccggcaccatcggcatcttcaagaaggaattcggggaggacgccaaggtctgggaccgcgagaaggtcgtcatcatcccggaccactacatcttcaccaccgacgagcgtgccaaccgcaatgtcgacatcctcagggacttctgtctcgagcagaacatcaagtacttctatgacatcaaggacctcagcaatttcaaggctaatccagactacaaaggtgtctgccacgttgcacttgctcaggaaggccactgccgaccaggcgaggttctcctgggcactgattctcatacgtgcaatgctggagcctttggtcaatttgctaccggaattggaaacaccgatgctggttttgtgttgggcactggaaaggctcttctcaaggtgccacctacaatcaggtttgtattagatggagaaatgccgccttatttacttgcgaaggatctgattttgcaaattattggtgagatttcagtatctggcgcaacctacaaatcaatggagtttgttggatcaactgtagagagtctaactatggaagagcgtatgacactatgcaacatggttattgaagctggtggaaagaacggtgttgtgcctgctgatgaaactacatttaaataccttgagggtaagacatcagttgattatgaacctgtctacagtgatgctcaggccagattttttagtgactaccgttttgatgtatcaaaactggagccagtagttgccaagccacattcgcctgacaaccgtgctctagcaagagaatgcaaagatgtcaaggttgaccgagtctatattggttcttgcactggtggtaagactgaggacttccttgctgctgcaaaggtgttcttagcctcgggaaagaaggttaaagttcccacatttcttgtccctgccacacaaaaggtgtggatggacgtatatagcctccctgtaccaggatctggtggcaaaacttgctcccagatatttgaggaggctggttgtgatacaccagcaagtcctagctgtggtgcttgtttgggtggtcctcgtgatacatatgcacggatgaatgaacctatggtctgcgtgtccactacgaacaggaacttcccgggcaggatggggcacaaggaagggcagatctacctggcgtctccctacactgcagctgcctcagccctgacggggtatgttacggaccccagggacttcctcatgtaattttgaaacaacagagttcatgatgtaacagattgcctgtagcctctgtttttcgtgttgaaccttagtttaggcgtgtctttcgttgaggaataagctgcatgtcgggaggttggcatgtatggttttgcattattacagtgtactaccaattaagaacatacttgagtgttacaagggaaatacattcttctgagtattgatggcagttcctagactcaaaacttcttgctataaggcctgttgagtgatct

SEQ ID NO: 928 - protein, 507 aa, sorghum bicolor
MASSISAAAKASTAFAHKKELAAPAPAQHRAGSSRRTKPCRVRAVASPARAPRAPSSTGSVKSAMTMTEKILARASERAALEPGENVWVDVDVLMTHDVCGPGTIGIFKKEFGEDAKVWDREKVVIIPDHYIFTTDERANRNVDILRDFCLEQNIKYFYDIKDLSNFKANPDYKGVCHVALAQEGHCRPGEVLLGTDSHTCNAGAFGQFATGIGNTDAGFVLGTGKALLKVPPTIRFVLDGEMPPYLLAKDLILQIIGEISVSGATYKSMEFVGSTVESLTMEERMTLCNMVIEAGGKNGVVPADETTFKYLEGKTSVDYEPVYSDAQARFFSDYRFDVSKLEPVVAKPHSPDNRALARECKDVKVDRVYIGSCTGGKTEDFLAAAKVFLASGKKVKVPTFLVPATQKVWMDVYSLPVPGSGGKTCSQIFEEAGCDTPASPSCGACLGGPRDTYARMNEPMVCVSTTNRNFPGRMGHKEGQIYLASPYTAAASALTGYVTDPRDFLM

SEQ ID NO: 929 - DNA, 1864 bp, glycine max
  CDS (36)..(1544)
acttattactactctctttgttcatcacatattcaatggcttcctctcttctctctccatcattcacttccttcccccgcataaagaaggatgtctctctctctgctttcacttctcagcgatgcttcaaagcgcttccaaggagaataatccgttgtgctgtggcggcgcctcagcgccaaccttccaccactggatcagtgaggactgcaatgaccatgactgagaagatactggccagagcttctgagaaggtacagctgacccctggcgataatgtttgggtcaatgttgatattttgatgacacatgatgtgtgtggccctggttctattgggattttcaagagggagtttggtgacgatgccaaggtttgggaccgtgaaaagcttgtaataatacccgaccattatatattcacaagtgatgaacgtgccaatcgcaatgtagacatattaagagatttctgccatgagcagaatatcaagtacttttatgatattaaggatctcagtaattttaaggtaaatccagactataagggtgtttgccatgttgcccttgctcaggaaggtcattgtaggcctggagaggttctcttaggtactgattctcacacttgtactgctggagcatttggccaatttgctacagggattggtaatactgatgctggctttgtgctgggaactgggaaacttctgcttaaggtgcccccaactttgagatttgtaatggatggagaaatgcctgattatttgctttctaaggatttgattctgcaaattattggtgaaataactgtggctggtgcaacatataaatcgatggagtttgtcggtacaactgttgaaagtttaactatggaagaacggatgacattgtgcaacatggttgttgaagctggtggaaagaatggtgttgttcctgctgacagcactacatttaaatatcttgagggcaagacatctctgccatatgaacctgtttatagtgacgatcaagcaagatttcttgctgagtatagatttgatgtctcaaaattggagccagtggtggccaagcctcattctccagataatcgtgctttggcaagggagtgcaaggatgtaaaaattgacagagtatacataggatcttgtacaggtggcaaaacggaggatttcatggctgctgcaaaagtttttctggcatcaggtaaacaggtcaaagttcctacatttcttgtgcctgcaacacaaaaggtttggatggacttatactcccttccagtccctggatctggtggtaagacgtgctcccagatatttgaagaagctgggtgtgacacaccagctagtcctagttgcggtgcttgtttgggtggcccgaaagatacttacgcacgcatgaatgaacctaaggtttgtgtttcaactacgaacaggaacttcccgggccgaatgggacacaaggaaggtcaaatctatttggcttccccatatacagctgctgcatctgcattgaccggttatgttactgatcctaaagagttcttgcagtagaatgttgttacagtcatcccattggtgttgtacacgttgttggttagttgtgtattctctagccataagttaaaactgatagctatttaagccgaccaatcttttggtattttttgtctgaagaaattttcggtgactattattcaattgacacagttttggttgttaaaaaagattggttcatttagtacttgttgagtatgacttggtcgttgctgttacagttgcaagtatgatttcatatggattttcttgtcaacccgtgttttattaactttgctttttgtttgttttaagttgatctttagaatcattccttc

SEQ ID NO: 930 - protein, 502 aa, glycine max
MASSLLSPSFTSFPRIKKDVSLSAFTSQRCFKALPRRIIRCAVAAPQRQPSTTGSVRTAMTMTEKILARASEKVQLTPGDNVWVNVDILMTHDVCGPGSIGIFKREFGDDAKVWDREKLVIIPDHYIFTSDERANRNVDILRDFCHEQNIKYFYDIKDLSNFKVNPDYKGVCHVALAQEGHCRPGEVLLGTDSHTCTAGAFGQFATGIGNTDAGFVLGTGKLLLKVPPTLRFVMDGEMPDYLLSKDLILQIIGEITVAGATYKSMEFVGTTVESLTMEERMTLCNMVVEAGGKNGVVPADSTTFKYLEGKTSLPYEPVYSDDQARFLAEYRFDVSKLEPVVAKPHSPDNRALARECKDVKIDRVYIGSCTGGKTEDFMAAAKVFLASGKQVKVPTFLVPATQKVWMDLYSLPVPGSGGKTCSQIFEEAGCDTPASPSCGACLGGPKDTYARMNEPKVCVSTTNRNFPGRMGHKEGQIYLASPYTAAASALTGYVTDPKEFLQ

SEQ ID NO: 931 - DNA, 2298 bp, Zea mays
  CDS (298)..(1815)
gtgatacaaccagcaagtcctaattgcggcgctcgtttgggtggccctcgcgatacgtatgcacggatgaatgaacctacggtctgcgtgtccaccacgaacaggaacttcccgggcaggatggggcccacaaggacggccgggggagctctacaccgtccattggcctcgaggccggccgggaaggcctcagcgtgctcgctcacctcctctgtcgcttgacctacccccctccgccccccgccgggcccgcagggtgttcgacccttcgcccgcccgcccgagcgccgccacggcatggcttcctccatctccgccgccgctaaggcctccgcggcctttgcccacaagaaggagctggccgcgccggcgccgcaccgcgcgggctcgagccgtcggaccaagccgtgccgcgtgcgcgccgtcgcgtcgcccgcgcgcaccccccgcgccccgtcgtccaccggctcggtgaagaccgcgatgacgatgacggagaagatcctggcgagggcgtcggagcgcgcggcgctggagcccggggagaacgtgtgggtggacatcgacgtgctcatgacgcacgacgtctgcgggcccggcaccatcggcatcttcaagaaggagttcggggaggatgccaaggtctgggaccgcgagaaggtcgtcatcatccccgaccactacatcttcaccagcgacgagcgcgccaaccgcaacgtcgatatcctcagggacttctgtctggagcagaacatcaagtacttctatgatatcaaggacctcagcgatttcagggctaatccagactacaagggtgtctgccacattgcacttgctcaggaaggccactgccgaccaggcgaggttctcctgggtactgattctcatacgtgcaatgctggagcctttggtcaatttgcaaccggaattggaaacactgatgcaggttttgtgatgggcactggaaaggctcttctcaaggtgccacctactatcaggtttgtattagatggagaaatgccgccttatttacttgcgaaggatctgattttgcaaattattggtgagatttcagtatctggtgcaacctacaaatcgatggagtttgttggatcaactgtagaaagtctaaccatggaagaacgtatgacactatgcaacatggttgttgaagctggtggaaagaacggtgtcgtgcctgctgatgaaactacatttaaataccttgagggtaggacatcagttgattatcaacctgtctacagtgatgctgaggccagattttttagtgactaccggtttgatgtatcgaaactggagccagtagttgccaagccacattcgcctgacaaccgtgccctagcaagagaatgcaaagatgtcaagatcgaccgagtctatattggttcctgcactggtggcaagactgaggacttccttgctgccgcaaaggtgttcttagcctcgggaaagaaggttaaagttcccacattccttgtccctgccacacaaaaggtgtggatggacgtatatagccttcctgtaccaggatctggcggcaaaacttgcgcccagatattcgaggaggctggttgtgatacaccagcaagtcctaattgcggcgcttgtctgggtggccctcgcgatacgtatgcacggatgaatgaacctacggtctgcgtgtccaccacgaacaggaacttcccgggcaggatggggcacaaggaagggcagatctacctggcgtccccctacaccgctgcagcctcggccctgacggggtacgtcacggaccccagggacttcctcatgtgaacgatcttgaaacagccacagagtgcctgcaccgctgttttttgtgttgaaccttagtttaggcgtgtgcccttcgttgagaaataaactcccatgtcgggaggctgccattgccatttatgttttttgcgttatatttattacagtgactgccgataacgtagttgagcgttacaagggaaatacattcattcttcccagtatcgatggcagtcactagactccgttcttacaaaaaaaaaggcatgtcgagagatcttgtagttcatacacttgttaaaacacttttttgtacaatgtatgggaaagaagctcagtcgatctttcttgtttaaaaaaaaaaaaaaaaaaaaaaaaactctaaaacctcccccttggccgcccttttttttttttttttttttacataaaacactcttttaatggggttgcttgcatgactttaaaggccaaaacaaaaaaaggtttacaaattaatatgaa

SEQ ID NO: 932 - protein, 505 aa, Zea mays
MASSISAAAKASAAFAHKKELAAPAPHRAGSSRRTKPCRVRAVASPARTPRAPSSTGSVKTAMTMTEKILARASERAALEPGENVWVDIDVLMTHDVCGPGTIGIFKKEFGEDAKVWDREKVVIIPDHYIFTSDERANRNVDILRDFCLEQNIKYFYDIKDLSDFRANPDYKGVCHIALAQEGHCRPGEVLLGTDSHTCNAGAFGQFATGIGNTDAGFVMGTGKALLKVPPTIRFVLDGEMPPYLLAKDLILQIIGEISVSGATYKSMEFVGSTVESLTMEERMTLCNMVVEAGGKNGVVPADETTFKYLEGRTSVDYQPVYSDAEARFFSDYRFDVSKLEPVVAKPHSPDNRALARECKDVKIDRVYIGSCTGGKTEDFLAAAKVFLASGKKVKVPTFLVPATQKVWMDVYSLPVPGSGGKTCAQIFEEAGCDTPASPNCGACLGGPRDTYARMNEPTVCVSTTNRNFPGRMGHKEGQIYLASPYTAAASALTGYVTDPRDFLM

SEQ ID NO: 933 - DNA, 1913 bp, Zea mays
  CDS (116)..(1630)
ccatcaccgcctcgtgtgcagcgtgctcgctcacctcctctgtcgacgcaccaccccgaagccctcccgccgcgctcgcagggtgttcgacccttcgcccgcgcgccctcacgacatggcctcctccgtctccgccgccgccaaggccgccgcggcgttcgcgcacaaggtccagaaggagctggccgcgccggcgcagcgccgcgcgggcttgacccgccggaccaagccgtgcagcgtgcgcgccgtcgcttcgcccgcgcgcgccctgtcgtccaccggctcggtgaagagcgcgatgacgatgacggagaagatactggcgcgggcgtcggagcgcgcggcgctggagcccggggagaacgtgtgggtcgacgtcgacgtgctcatgacgcacgacgtctgcgggcccggcgccttcgacatcttcaagaaggagttcggggaggacgccagggtctgggaccgcgagaagctcgtcgtcatcccggaccactacatcttcaccagcgacggccgtgccaaacgcaacgtcgacatcctcagggacttctgtgcggagcagaacatcaagtacttctatgacatcaaggacctcagcgatttcagggctaatccggactacaaaggcgtctgccacatcgcacttgctcaggaagcccactgccgaccaggcgaggttctcttgggcactgattctcatacatgcaatgctggagcttttggtcagtttgcaactggaatcggaaacactgatgcaggttttgtgttgggcactggaaaggctcttctcaaggtgccacctactatcaggtttatattagatggagagatgccgccttatttacttgcgaaggatctgattttgcaaattattggagagatttcagtatctggtgcgacctacaaatcaatggagtttgttggatcaactgtagaaagtctaaccatggaagagcgtatgacactatgcaacatggttattgaagctggtggaaagaacggtgttgtgcctgctgatgaaactacatttaaataccttgagggtaagacatcagtcgattatgaacctgtctacagtgatgctcaagccagattttttagcgactaccggtttgatgtatcaaaactggagccagtagttgccaagccacattcgcctgacaaccgtgctccagcacgagaatgcaaagatgtgaagatcgaccgagtctatattggttcttgcactggtggtaagaccgaggatttccttgctgctgcaaaggtgttcttagcctcgggaaagaaggttaaagttcccacatttcttgtccctgccacacaaaaggtgtggttggacatatatagcctccctgtaccaggatctggtggcaaaacttgctcccagatatttgaggaggctggttgtgacacaccagcaagtcctaattgtggtgcttgtttgggtggccctcgtgatacatatgcacggatgaatgaacctactgtctgcgtgtccaccacgaacaggaactttccgggcaggatggggcacaaggaagggcaaatctacctggcgtctccctacactgcggctgcctcagccctgacggggtatgttacggaccccagggacttcctcatgtaaccgtcttgaaacaacaacagatttcatgatgtaacagagtggttgtactgctgtttttcgtgctgaacttttgtctaggcatgtccttcgttgagaaataaactgcactagaataagcagcgacttctcgggagccatagcagatgtgacctcatatttatttgtgcaactttttttgtttttggctctgaagtcatgcaaggaaaccacataaaagagtgatttatgtatgtgtcagaatcaaacaataattgtcaaaaaaaaaaaaaaaacccagttctgt

SEQ ID NO: 934 - protein, 504 aa, Zea mays
MASSVSAAAKAAAAFAHKVQKELAAPAQRRAGLTRRTKPCSVRAVASPARALSSTGSVKSAMTMTEKILARASERAALEPGENVWVDVDVLMTHDVCGPGAFDIFKKEFGEDARVWDREKLVVIPDHYIFTSDGRAKRNVDILRDFCAEQNIKYFYDIKDLSDFRANPDYKGVCHIALAQEAHCRPGEVLLGTDSHTCNAGAFGQFATGIGNTDAGFVLGTGKALLKVPPTIRFILDGEMPPYLLAKDLILQIIGEISVSGATYKSMEFVGSTVESLTMEERMTLCNMVIEAGGKNGVVPADETTFKYLEGKTSVDYEPVYSDAQARFFSDYRFDVSKLEPVVAKPHSPDNRAPARECKDVKIDRVYIGSCTGGKTEDFLAAAKVFLASGKKVKVPTFLVPATQKVWLDIYSLPVPGSGGKTCSQIFEEAGCDTPASPNCGACLGGPRDTYARMNEPTVCVSTTNRNFPGRMGHKEGQIYLASPYTAAASALTGYVTDPRDFLM

SEQ ID NO: 935 - DNA, 1965 bp, Zea mays subsp. mays
  CDS (111)..(1628)
aaggcctcaacacacacacacactctctcgcttgacctacccccctccgccccccgccgggcctgcagggtgttcgacgcttcgcccgcccgcccgagcgccgccacggcatggcttcctccatctccgccgccgctaaggcctccgcggcctttgcccaaaagaaggagctggccgcgccggcgccgcaccgcgcgggctcgagccgtcggaccaagccgtgccgcgtgcgcgccgtcgcgtcgcccgcgcgcaccccccgcgccccgtcgtccaccggctcggtgaagaccgcgatgacgatgacggagaagatcctggcgagggcgtcggagcgcgcggcgctggagcccggggagaacgtgtgggtggacatcgacgtgctcatgacgcacgacgtctgcgggcccggcaccatcggcatcttcaagaaggagttcggggaggatgccaaggtctgggaccgcgagaaggtcgtcatcatccccgaccactacatcttcaccagcgacgagcgcgccaaccgcaacgtcgatatcctcagggacttctgtctggagcagaacatcaagtacttctatgatatcaaggacctcagcgatttcagggctaatccagactacaagggtgtctgccacattgcacttgctcaggaaggccactgccgaccaggcgaggttctcctgggtactgattctcatacgtgcaatgctggagcctttggtcaatttgcaaccggaattggaaacactgatgcaggttttgtgatgggcactggaaaggctcttctcaaggtgccacctactatcaggtttgtattagatggagaaatgccgccttatttacttgcgaaggatctgattttgcaaattattggtgagatttcagtatctggtgcaacctacaaatcgatggagtttgttggatcaactgtagaaagtctaaccatggaagaacgtatgacactatgcaacatggttgttgaagctggtggaaagaacggtgtcgtgcctgctgatgaaactacatttaaataccttgagggtaggacatcagttgattatcaacctgtctacagtgatgctgaggccagattttttagtgactaccggtttgatgtatcgaaactggagccagtagttgccaagccacattcgcctgacaaccgtgccctagcaagagaatgcaaagatgtcaagatcgaccgagtctatattggttcctgcactggtggcaagactgaggacttccttgctgccgcaaaggtgttcttagcctcgggaaagaaggttaaagttcccacattccttgtccctgccacacaaaaggtgtggatggacgtatatagccttcctgtaccaggatctggcggcaaaacttgcgcccagatattcgaggaggctggttgtgatacaccagcaagtcctaattgcggcgcttgtctgggtggccctcgcgatacgtatgcacggatgaatgaacctacggtctgcgtgtccaccacgaacaggaacttcccgggcaggatggggcacaaggaagggcagatctacctggcgtccccctacaccgctgcagcctcggccctgacggggtacgtcacggaccccagggacttcctcatgtgaaacgatcttgaaacagccacagagtgcctgcaccgctgttttttgtgttgaaccttagtttaggcgtgtgcccttcgttgagaaataaactcccatgtcgggaggctgccattgccatttatgttttttgcgttatatttattacagtgactgccgataacgtagttgagcgttacaagggaaatacattcattcttcccagtatcgatggcagtcactagactccgttcttacaaaaaaaaaggcatgtcgagagatcttgtagttcatacacttgttaaaacacttttttgtacaatgtatgggaaagaagctcagtcgatctttcttgttttgc

SEQ ID NO: 936 - protein, 505 aa, Zea mays subsp. mays
MASSISAAAKASAAFAQKKELAAPAPHRAGSSRRTKPCRVRAVASPARTPRAPSSTGSVKTAMTMTEKILARASERAALEPGENVWVDIDVLMTHDVCGPGTIGIFKKEFGEDAKVWDREKVVIIPDHYIFTSDERANRNVDILRDFCLEQNIKYFYDIKDLSDFRANPDYKGVCHIALAQEGHCRPGEVLLGTDSHTCNAGAFGQFATGIGNTDAGFVMGTGKALLKVPPTIRFVLDGEMPPYLLAKDLILQIIGEISVSGATYKSMEFVGSTVESLTMEERMTLCNMVVEAGGKNGVVPADETTFKYLEGRTSVDYQPVYSDAEARFFSDYRFDVSKLEPVVAKPHSPDNRALARECKDVKIDRVYIGSCTGGKTEDFLAAAKVFLASGKKVKVPTFLVPATQKVWMDVYSLPVPGSGGKTCAQIFEEAGCDTPASPNCGACLGGPRDTYARMNEPTVCVSTTNRNFPGRMGHKEGQIYLASPYTAAASALTGYVTDPRDFLM

SEQ ID NO: 937 - DNA, 1965 bp, Zea mays subsp. mays; identical to SEQ ID NO: 935
  CDS (297)..(1628)

SEQ ID NO: 938 - protein, 443 aa, Zea mays subsp. mays
MTMTEKILARASERAALEPGENVWVDIDVLMTHDVCGPGTIGIFKKEFGEDAKVWDREKVVIIPDHYIFTSDERANRNVDILRDFCLEQNIKYFYDIKDLSDFRANPDYKGVCHIALAQEGHCRPGEVLLGTDSHTCNAGAFGQFATGIGNTDAGFVMGTGKALLKVPPTIRFVLDGEMPPYLLAKDLILQIIGEISVSGATYKSMEFVGSTVESLTMEERMTLCNMVVEAGGKNGVVPADETTFKYLEGRTSVDYQPVYSDAEARFFSDYRFDVSKLEPVVAKPHSPDNRALARECKDVKIDRVYIGSCTGGKTEDFLAAAKVFLASGKKVKVPTFLVPATQKVWMDVYSLPVPGSGGKTCAQIFEEAGCDTPASPNCGACLGGPRDTYARMNEPTVCVSTTNRNFPGRMGHKEGQIYLASPYTAAASALTGYVTDPRDFLM

SEQ ID NO: 939 - DNA, 1965 bp, Zea mays subsp. mays; identical to SEQ ID NO: 935
  CDS (303)..(1628)

SEQ ID NO: 940 - protein, 441 aa, Zea mays subsp. mays
MTEKILARASERAALEPGENVWVDIDVLMTHDVCGPGTIGIFKKEFGEDAKVWDREKVVIIPDHYIFTSDERANRNVDILRDFCLEQNIKYFYDIKDLSDFRANPDYKGVCHIALAQEGHCRPGEVLLGTDSHTCNAGAFGQFATGIGNTDAGFVMGTGKALLKVPPTIRFVLDGEMPPYLLAKDLILQIIGEISVSGATYKSMEFVGSTVESLTMEERMTLCNMVVEAGGKNGVVPADETTFKYLEGRTSVDYQPVYSDAEARFFSDYRFDVSKLEPVVAKPHSPDNRALARECKDVKIDRVYIGSCTGGKTEDFLAAAKVFLASGKKVKVPTFLVPATQKVWMDVYSLPVPGSGGKTCAQIFEEAGCDTPASPNCGACLGGPRDTYARMNEPTVCVSTTNRNFPGRMGHKEGQIYLASPYTAAASALTGYVTDPRDFLM

SEQ ID NO: 941 - DNA, 1683 bp, Glycine max
  CDS (75)..(1577)
agatataacagcagacactacctgcggaagacgatccggagccgccacctattcttttgttcatcacatattcaatggcttcctctcttctctctccatcatttacatccttcctccgcaccaaggatctctctctctctgctttcacttctcagcgatgcttcaaagcggtgccaaggaaaataatccgttgtgctattgcggcgcctcagcgccaaccttccaccactggatcagtgaggactgcaatgaccatgactgagaagatattggccagagcttctgagaaggcacagctgacccctggggataatgtttgggtcaatgttgatattttgatgacacatgatgtgtgtggccctggttctattgggattttcaagagggagtttggcgaggatgccaaggtttgggaccgtgaaaagcttgtaataatacctgaccactatattttcacaagtgatgaacgtgccaatcgcaatgtagacatattaagagatttctgccatgagcagaatatcaagtacttttatgatattaaggatcttagtaattttaaggtaaatccagactataagggtgtttgccatgttgctcttgctcaggaaggtcattgtaggccaggagaggttctcttaggtactgattctcacacttgtactgctggagcatttggtcaatttgctacagggattggtaatactgatgccggctttgtgctgggaactgggaaacttctgctcaaggtgcccccaactttgagatttgtaatggatggagaaatgcccgattatttgctttctaaggatttgattctgcaaattattggtgaaataactgtggctggggcaacatataaatcgatggagtttgttggtacaaccgttgaaagtttaactatggaagaacggatgacattgtgcaacatggttgttgaagctggtggaaagaatggtgttgttcctgctgacagcactacatttaaatatcttgagggcaagacatctctgccatatgaacctgtttatagtgacgatcaagcaagatttctcgcagagtatagatttgatgtctcaaaattggagccagtggtggccaagcctcattctccggataatcgtgctttggcaagagagtgcaaggatgtgaaaattgacagagtatacataggatcttgtacaggtggcaaaacagaggatttcatggctgcagcaaaagtttttctggcatcaggtaaacaggtcaaagttcctacatttcttgtgcctgcaacacaaaaggtttggatggacttgtactccctccctgtccctggatctggtggtaagacatgctcacagatatttgaagaagttgggtgtgacacaccagctagtcctagttgtggtgcttgtttgggtggcccaaaagatacttacgcacgcatgaatgaacctaaggtttgtgtttcaactacgaacaggaacttcccgggccgaatgggacacaaggaaggtcaaatctatttggcttccccttatacagctgctgcatctgcattgaccggttatgttactgatcctagagagttcttgtagtagaatgttgttacaatcatctcattgtgttgtactcgttgttggttatttgtgtattctctactctctactagtcataagttaaaactgacaactatttaagctc

SEQ ID NO: 942 - protein, 500 aa, Glycine max
MASSLLSPSFTSFLRTKDLSLSAFTSQRCFKAVPRKIIRCAIAAPQRQPSTTGSVRTAMTMTEKILARASEKAQLTPGDNVWVNVDILMTHDVCGPGSIGIFKREFGEDAKVWDREKLVIIPDHYIFTSDERANRNVDILRDFCHEQNIKYFYDIKDLSNFKVNPDYKGVCHVALAQEGHCRPGEVLLGTDSHTCTAGAFGQFATGIGNTDAGFVLGTGKLLLKVPPTLRFVMDGEMPDYLLSKDLILQIIGEITVAGATYKSMEFVGTTVESLTMEERMTLCNMVVEAGGKNGVVPADSTTFKYLEGKTSLPYEPVYSDDQARFLAEYRFDVSKLEPVVAKPHSPDNRALARECKDVKIDRVYIGSCTGGKTEDFMAAAKVFLASGKQVKVPTFLVPATQKVWMDLYSLPVPGSGGKTCSQIFEEVGCDTPASPSCGACLGGPKDTYARMNEPKVCVSTTNRNFPGRMGHKEGQIYLASPYTAAASALTGYVTDPREFL

SEQ ID NO: 943 - DNA, 1683 bp, Glycine max; identical to SEQ ID NO: 941
  CDS (249)..(1577)

SEQ ID NO: 944 - protein, 442 aa, Glycine max
MTMTEKILARASEKAQLTPGDNVWVNVDILMTHDVCGPGSIGIFKREFGEDAKVWDREKLVIIPDHYIFTSDERANRNVDILRDFCHEQNIKYFYDIKDLSNFKVNPDYKGVCHVALAQEGHCRPGEVLLGTDSHTCTAGAFGQFATGIGNTDAGFVLGTGKLLLKVPPTLRFVMDGEMPDYLLSKDLILQIIGEITVAGATYKSMEFVGTTVESLTMEERMTLCNMVVEAGGKNGVVPADSTTFKYLEGKTSLPYEPVYSDDQARFLAEYRFDVSKLEPVVAKPHSPDNRALARECKDVKIDRVYIGSCTGGKTEDFMAAAKVFLASGKQVKVPTFLVPATQKVWMDLYSLPVPGSGGKTCSQIFEEVGCDTPASPSCGACLGGPKDTYARMNEPKVCVSTTNRNFPGRMGHKEGQIYLASPYTAAASALTGYVTDPREFL

SEQ ID NO: 945 - DNA, 1683 bp, Glycine max; identical to SEQ ID NO: 941
  CDS (255)..(1577)

SEQ ID NO: 946 - protein, 440 aa, Glycine max
MTEKILARASEKAQLTPGDNVWVNVDILMTHDVCGPGSIGIFKREFGEDAKVWDREKLVIIPDHYIFTSDERANRNVDILRDFCHEQNIKYFYDIKDLSNFKVNPDYKGVCHVALAQEGHCRPGEVLLGTDSHTCTAGAFGQFATGIGNTDAGFVLGTGKLLLKVPPTLRFVMDGEMPDYLLSKDLILQIIGEITVAGATYKSMEFVGTTVESLTMEERMTLCNMVVEAGGKNGVVPADSTTFKYLEGKTSLPYEPVYSDDQARFLAEYRFDVSKLEPVVAKPHSPDNRALARECKDVKIDRVYIGSCTGGKTEDFMAAAKVFLASGKQVKVPTFLVPATQKVWMDLYSLPVPGSGGKTCSQIFEEVGCDTPASPSCGACLGGPKDTYARMNEPKVCVSTTNRNFPGRMGHKEGQIYLASPYTAAASALTGYVTDPREFL

SEQ ID NO: 947 - DNA, 1515 bp, Zea mays
  CDS (1)..(1515)
atggcctcctccgtctccgccgccgccaaggccgccgcggcgttcgcgcacaaggtccagaaggagctggccgcgccggcgcagcgccgcgcgggcttgacccgccggaccaagccgtgcagcgtgcgcgccgtcgcttcgcccgcgcgcgccctgtcgtccaccggctcggtgaagagcgcgatgacgatgacggagaagatactggcgcgggcgtcggagcgcgcggcgctggagcccggggagaacgtgtgggtcgacgtcgacgtgctcatgacgcacgacgtctgcgggcccggcgccttcgacatcttcaagaaggagttcggggaggacgccagggtctgggaccgcgagaagctcgtcgtcatcccggaccactacatcttcaccagcgacggccgtgccaaacgcaacgtcgacatcctcagggacttctgtgcggagcagaacatcaagtacttctatgacatcaaggacctcagcgatttcagggctaatccggactacaaaggcgtctgccacatcgcacttgctcaggaaggccactgccgaccaggcgaggttctcttgggcactgattctcatacatgcaatgctggagcttttggtcagtttgcaactggaatcggaaacactgatgcaggttttgtgttgggcactggaaaggctcttctccaggtgccacctactatcaggtttatattagatggagagatgccgccttatttacttgcgaaggatctgattttgcaaattattggagagatttcagtatctggtgcgacctacaaatcaatggagtttgttggatcaactgtagaaagtctaaccatggaagagcgtatgacactatgcaacatggttattgaagctggtggaaagaacggtgttgtgcctgctgatgaaactacatttaaataccttgagggtaagacatcagtcgattatgaacctgtctacagtgatgctcaagccagattttttagcgactaccggtttgatgtatcaaaactggagccagtagttgccaagccacattcgcctgacaaccgtgctccagcaagagaatgcaaagatgtgaagatcgaccgagtctatattggttcttgcactggtggtaagaccgaggatttccttgctgctgcaaaggtgttcttagcctcgggaaagaaggttaaagttcccacatttcttgtccctgccacacaaaaggtgtggttggacatatatagcctccctgtaccaggatctggtggcaaaacttgctcccagatatttgaggaggctggttgtgacacaccagcaagtcctaattgtggtgcttgtttgggtggccctcgtgatacatatgcacggatgaatgaacctactgtctgcgtgtccaccacgaacaggaactttccgggcaggatgggccacaaggaagggcaaatctacctggcgtctccctacactgcggctgcctcagccctgacggggtatgttacggaccccagggacttcctcatgtaa

SEQ ID NO: 948 - protein, 504 aa, Zea mays
MASSVSAAAKAAAAFAHKVQKELAAPAQRRAGLTRRTKPCSVRAVASPARALSSTGSVKSAMTMTEKILARASERAALEPGENVWVDVDVLMTHDVCGPGAFDIFKKEFGEDARVWDREKLVVIPDHYIFTSDGRAKRNVDILRDFCAEQNIKYFYDIKDLSDFRANPDYKGVCHIALAQEGHCRPGEVLLGTDSHTCNAGAFGQFATGIGNTDAGFVLGTGKALLQVPPTIRFILDGEMPPYLLAKDLILQIIGEISVSGATYKSMEFVGSTVESLTMEERMTLCNMVIEAGGKNGVVPADETTFKYLEGKTSVDYEPVYSDAQARFFSDYRFDVSKLEPVVAKPHSPDNRAPARECKDVKIDRVYIGSCTGGKTEDFLAAAKVFLASGKKVKVPTFLVPATQKVWLDIYSLPVPGSGGKTCSQIFEEAGCDTPASPNCGACLGGPRDTYARMNEPTVCVSTTNRNFPGRMGHKEGQIYLASPYTAAASALTGYVTDPRDFLM

SEQ ID NO: 949 - DNA, 1688 bp, Zea mays
  CDS (264)..(1595)
  misc_feature (1673)..(1673): n is a, g, c or t
gcacgagctgacgcaccaccccgaagccctcccgccgcgctcgcagggtgttcgacccttcgcccgcgcgccctcacgacatggcctcctccgtctccgccgccgccaaggccgccgcggcgttcgcgcacaaggtccagaaggagctggccgcgccggcgcagcgccgcgcgggcttgacccgccggaccaagccgtgcagcgtgcgcgccgtcgcttcgcccgcgcgcgccctgtcgtccaccggctcggtgaagagcgcgatgacgatgacggagaagatactggcgcgggcgtcggagcgcgcggcgctggagcccggggagaacgtgtgggtcgacgtcgacgtgctcatgacgcacgacgtctgcgggcccggcgccttcgacatcttcaagaaggagttcggggaggacgccagggtctgggaccgcgagaagctcgtcgtcatcccggaccactacatcttcaccagcgacggccgtgccaaacgcaacgtcgacatcctcagggacttctgtgcggagcagaacatcaagtacttctatgacatcaaggacctcagcgatttcagggctaatccggactacaaaggcgtctgccacatcgcacttgctcaggaagcccactgccgaccaggcgaggttctcttgggcactgattctcatacatgcaatgctggagcttttggtcagtttgcaactggaatcggaaacactgatgcaggttttgtgttgggcactggaaaggctcttctcaaggtgccacctactatcaggtttatattagatggagagatgccgccttatttacttgcgaaggatctgattttgcaaattattggagagatttcagtatctggtgcgacctacaaatcaatggagtttgttggatcaactgtagaaagtctaaccatggaagagcgtatgacactatgcaacatggttattgaagctggtggaaagaacggtgttgtgcctgctgatgaaactacatttaaataccttgagggtaagacatcagtcgattatgaacctgtctacagtgatgctcaagccagattttttagcgactaccggtttgatgtatcaaaactggagccagtagttgccaagccacattcgcctgacaaccgtgctccagcacgagaatgcaaagatgtgaagatcgaccgagtctatattggttcttgcactggtggtaagaccgaggatttccttgctgctgcaaaggtgttcttagcctcgggaaagaaggttaaagttcccacatttcttgtccctgccacacaaaaggtgtggttggacatatatagcctccctgtaccaggatctggtggcaaaacttgctcccagatatttgaggaggctggttgtgacacaccagcaagtcctaattgtggtgcttgtttgggtggccctcgtgatacatatgcacggatgaatgaacctactgtctgcgtgtccaccacgaacaggaactttccgggcaggatgggccacaaggaagggcaaatctacctggcgtctccctacactgcggctgcctcagccctgacggggtatgttacggaccccaaggacttcctcatgtaaccgtcttgaaacaacaacagatttcatgatgtaacagagtggttgtactgctgtttttcgtgctgaacttttgtccangcatgtccttcgttg

SEQ ID NO: 950 - protein, 443 aa, Zea mays
MTMTEKILARASERAALEPGENVWVDVDVLMTHDVCGPGAFDIFKKEFGEDARVWDREKLVVIPDHYIFTSDGRAKRNVDILRDFCAEQNIKYFYDIKDLSDFRANPDYKGVCHIALAQEAHCRPGEVLLGTDSHTCNAGAFGQFATGIGNTDAGFVLGTGKALLKVPPTIRFILDGEMPPYLLAKDLILQIIGEISVSGATYKSMEFVGSTVESLTMEERMTLCNMVIEAGGKNGVVPADETTFKYLEGKTSVDYEPVYSDAQARFFSDYRFDVSKLEPVVAKPHSPDNRAPARECKDVKIDRVYIGSCTGGKTEDFLAAAKVFLASGKKVKVPTFLVPATQKVWLDIYSLPVPGSGGKTCSQIFEEAGCDTPASPNCGACLGGPRDTYARMNEPTVCVSTTNRNFPGRMGHKEGQIYLASPYTAAASALTGYVTDPKDFLM

SEQ ID NO: 951 - DNA, 1804 bp, Zea mays
  CDS (84)..(1598)
acctcctctgtcgacgcaccaccccgaagcccccccgccgcgctcgcagggtgttcgacccttcgcccgcgcgccctcacgacatggcctcctccgtctccgccgccgccaaggccgccgcggcgttcgcgcacaaggtccagaaggagctggccgcgccggcgcagcgccgcgcgggcttgacccgccggaccaagccgtgcagcgtgcgcgccgtcgcttcgcccgcgcgcgccctgtcgtccaccggctcggtgaagagcgcgatgacgatgacggagaagatactggcgcgggcgtcggagcgcgcggcgttggagcctggggagaacgtgtgggtcgacgtcgacgtgctcatgacgcacgacgtctgcgggcccggcgccttcgacatcttcaagaaggagttcggggaggacgccagggtctgggaccgcgagaagctcgtcgtcatcccggaccactacatcttcaccagcgacgaccgcgccaaccgcaacgtcgacatcctcagggacttctgtgcggagcagaacatcaagtacttctatgacatcaaggacctcagcgatttcagggctaatccggactacaaaggcgtctgccacatcgcacttgctcaggaaggccactgccgaccaggcgaggttctcttgggcactgattctcacacatgcaatgctggagcttttggtcagtttgcaactggaatcggaaacactgacgcaggttttgtgttgggcactggaaaggctcttctcaaggtgccacctactatcaggtttatattagatggagagatgccgccttatttacttgcaaaggatctgattttgcaaattattggtgagatttcagtatctggtgcaacctacaaatcaatggagtttgttggatcaactgtagaaagtctaaccatggaagagcgtatgacactgtgcaacatggttattgaagctggtggaaagaacggtgttgtgcctgctgatgaaactacatttaaataccttgagggtaagacatcagtcgattatgaacctgtctacagtgatgctcaagccagattttttagcgactaccggtttgatgtatcaaaactggagccagtagttgccaagccacattcgcctgacaaccgtgctccagcaagagaatgcaaagatgtgaagatcgaccgagtctatattggttcttgcactggtggtaagaccgaggatttccttgctgctgcaaagttgttcttagcctcgggaaagaaggttaaagttcccacatttcttgtccctgccacgcaaaaggtgtggttggacgtatatagcctccctgtaccaggatctggtggcaaaacttgctcccagatatttgaggaggctggttgtgacacaccagcaagtcctaattgtggtgcttgtttgggtggccctcgtgatacatatgcacggatgaatgaacctactgtctgcgtgtccaccacgaacaggaactttccgggcaggatggggcacaaggaagggcaaatctacctggcgtctccctacactgcggctgcctcagccctgacggggtacgttacggacccaagggacttcctcatgtaacgtcttgaaacaacaacagatttcatgatgtaacagagtggctgtactgctgtttttcgtgctgaacttttgtctaggcatgtccttcgttgagaaataaactgcactagaataagcagcgacttctcgggcgccatagcagatgtgacctcatatttatttgtgcaactttttttgtttttggctctgtaaaaaaaaaaaaaaaa

SEQ ID NO: 952 - protein, 504 aa, Zea mays
MASSVSAAAKAAAAFAHKVQKELAAPAQRRAGLTRRTKPCSVRAVASPARALSSTGSVKSAMTMTEKILARASERAALEPGENVWVDVDVLMTHDVCGPGAFDIFKKEFGEDARVWDREKLVVIPDHYIFTSDDRANRNVDILRDFCAEQNIKYFYDIKDLSDFRANPDYKGVCHIALAQEGHCRPGEVLLGTDSHTCNAGAFGQFATGIGNTDAGFVLGTGKALLKVPPTIRFILDGEMPPYLLAKDLILQIIGEISVSGATYKSMEFVGSTVESLTMEERMTLCNMVIEAGGKNGVVPADETTFKYLEGKTSVDYEPVYSDAQARFFSDYRFDVSKLEPVVAKPHSPDNRAPARECKDVKIDRVYIGSCTGGKTEDFLAAAKLFLASGKKVKVPTFLVPATQKVWLDVYSLPVPGSGGKTCSQIFEEAGCDTPASPNCGACLGGPRDTYARMNEPTVCVSTTNRNFPGRMGHKEGQIYLASPYTAAASALTGYVTDPRDFLM

SEQ ID NO: 953 - DNA, 1362 bp, Methanosarcina mazei Go1
  CDS (1)..(1362): transl_table=11
atgaacttcatttctttttgggatcatcaattaaatttatttattagaaagcgccagttatttcccatgaccggaatgtctggtagtgacaatcgcccgatgaccgtttcggagaagatcttttcgaaagcctccggaactcccgtgaaagccggggatttcgtactggcaaatatagacctggcaatgacccacgacatcacaggtccgctggcagtccagggcttctacgaaatcatgagagatgaagaagacaagaaagtatgggacccgagcaaaattgtaattatattcgaccaccaggtccctgcagactcaattaatgccgctcaaaaccatatcatgctcagaaagtttgcaaaagagcagggcattttaaattatgatgtttatgaaggagtctgccaccaagtccttccagaaaaagggcatgttaagcccggagacctgattgttggttctgactcccatacctgtgcatacggatctttaggggcattttctaccggcataggctctaccgatatggcagcggtttttgccacaggcaagctctggttccgggttcccgagactttccgctttgaagtggaaggaaaactaccagagcgcgtttattccaaagaccttatactgcacctaataggagacgtaggcgtggaaggggtcagatacatggcagccgagtacgcgggttctacaatccgttccctttccatccccgagcgcatgaccatgtccaacatggcaattgaaatgggaggaaaagcagggataattgaagccgatgaagttaccgaggcataccttaaagagcgcattccgggtttcaagcttgatccgtactggaaatccgatgaaggtgccaaatatctggatatcaggtattatgatgtttctgaccttgagccccaggtagcctgcccgcataatgttgacaacgtaaagccggtaagcgaagttgaaggcacaaaactcgaccagatctttatgggatcctgcacaaacggcaggtttgaagacatcaagataatggctgacatcatgggagatgaacctgttgcgaaaaatttgcgcctccttgttgttcccgcttcaaaaactgaatatatgaagctgttaaaagccggatatattgaaaaactcgtgaacgcgggcgcaatcgtggaagctccctgctgcgggccatgcatgggcggctcttttggtcttctcggacctggagaggtcggacttgccacctcaaaccgcaatttcaagggcagagaaggaagtgcagagtcttttgtttacctttcttccccggcaactgcaggagcatccgccctcactggagaaatcacggatcccaggaaggtttaa

SEQ ID NO: 954 - protein, 453 aa, Methanosarcina mazei Go1
MNFISFWDHQLNLFIRKRQLFPMTGMSGSDNRPMTVSEKIFSKASGTPVKAGDFVLANIDLAMTHDITGPLAVQGFYEIMRDEEDKKVWDPSKIVIIFDHQVPADSINAAQNHIMLRKFAKEQGILNYDVYEGVCHQVLPEKGHVKPGDLIVGSDSHTCAYGSLGAFSTGIGSTDMAAVFATGKLWFRVPETFRFEVEGKLPERVYSKDLILHLIGDVGVEGVRYMAAEYAGSTIRSLSIPERMTMSNMAIEMGGKAGIIEADEVTEAYLKERIPGFKLDPYWKSDEGAKYLDIRYYDVSDLEPQVACPHNVDNVKPVSEVEGTKLDQIFMGSCTNGRFEDIKIMADIMGDEPVAKNLRLLVVPASKTEYMKLLKAGYIEKLVNAGAIVEAPCCGPCMGGSFGLLGPGEVGLATSNRNFKGREGSAESFVYLSSPATAGASALTGEITDPRKV

SEQ ID NO: 955 - DNA, 1296 bp, Chlorobium tepidum TLS
  CDS (1)..(1296): transl_table=11
atggcacaaacgataacccagaaaattttcgccagggctgcgaaccgcaaattcgtcgatcccggccagagcgtatggctcaatgtcgatgttctcttgacgcacgacgtctgcggcccgccgaccttcgatatcttcaagcaggagttcggcccgaacgccaaggtgtgggatccgtcgaaagtggtggtgcttcccgaccactacatcttcacggccaacgagcacgcgcaccgcaatatcgacctcttgcgccagttcgccgccgagcagggcttgccgaactactatgatgtaggcaccgaccgctaccgcggcgtctgccacgtcgcgctggccgaagagggctttaacctccccggcaccgtgctgttcggcaccgactcgcacacctgcacctcgggcgcattcggcatgttcggctccggcatcggcaacaccgacgcagccttcatcctcggcaccggcaagctctgggagaaggtgcctgattcgatgaagttcacctttgaaggccagatgcccgagtacctgacggccaaagacctgatcctccagatcctcggcgacatcaccaccgacggcgcgacctaccgcgccatggagttcgatggcgaagcggtctattcgctgccgatcgacgagcgcatgacgctctgcaacatggccatcgaggcgggcggcatgaacggtatcatcgctgccgatgcggtcaccgaagccttcgtgaaggcgcgcaccagcaagccgtacgaaatcttcacgagcgatcccgacgcgcagtaccacagcatgtaccgctacaacgtcgaaaagatggagccgatcgtcgccaagccgcacagcccggacaaccgcgccaccgtgcacagcgtggccggaacgccgatcaccaaatcgtacatcggctcctgtaccggcggcaagctgaccgacttcaagctcgcagcgaagattctcaagggcaagaaggtggcggtcacaaccaacatcgtcccggcaaccgtgctcgtggcatcgcagctcgaaaccgagatgtacgatggccagacactgcgccatattttcgaggaagctggctgcaacatcgccctgccatcgtgcgcggcgtgtctcggcggcccttcggacacggtcgggcgctcggtggacaacgacgtcgtcgtttcgaccaccaaccgcaacttccctggccgcatgggcagcaagttcgcgagcgtctatctggcctcgccgctgactgcggcagcctctgccataacgggcaaactcaccgatccgagagatttcctctga

SEQ ID NO: 956 - protein, 431 aa, Chlorobium tepidum TLS
MAQTITQKIFARAANRKFVDPGQSVWLNVDVLLTHDVCGPPTFDIFKQEFGPNAKVWDPSKVVVLPDHYIFTANEHAHRNIDLLRQFAAEQGLPNYYDVGTDRYRGVCHVALAEEGFNLPGTVLFGTDSHTCTSGAFGMFGSGIGNTDAAFILGTGKLWEKVPDSMKFTFEGQMPEYLTAKDLILQILGDITTDGATYRAMEFDGEAVYSLPIDERMTLCNMAIEAGGMNGIIAADAVTEAFVKARTSKPYEIFTSDPDAQYHSMYRYNVEKMEPIVAKPHSPDNRATVHSVAGTPITKSYIGSCTGGKLTDFKLAAKILKGKKVAVTTNIVPATVLVASQLETEMYDGQTLRHIFEEAGCNIALPSCAACLGGPSDTVGRSVDNDVVVSTTNRNFPGRMGSKFASVYLASPLTAAASAITGKLTDPRDFL

SEQ ID NO: 957 - DNA, 1275 bp, Methanococcus maripaludis S2
  CDS (1)..(1275): transl_table=11
atggcaatgaccctagctgaaaaaattttggcaaaagcttcaggtaactcagaggtttcacctggagacatcgttatggctaaagtagaaaccgcgatggtccacgatattacaggcccgctttcagtaaatacattaaaaaaagaaggtatttcaaaagtttgggacaatgaaaagattgtgattccattcgaccaccagatacctgctgatagcatcaacgctgctgaaaatcatatattaatgagaaactttgtaaaagaacaaaatatcaaacacttctatgacattagagaaggagtttgccatcaggtattacctgaaaaaggtcacatagttccaggaactgttgtagttggtgcagacagccacacctgtacatacggtgcatttggtgcatttgcaacaggaattggaagtaccgacatggctgctgcatttgcaactggtgaattatggtttaaagttcctgaaacactttacttcaatataactggtgagttaaaaccagaagtaatgtctaaagatgtaatcttgagcattatcggaatggttggagctgacggtgcaacatacaaagctgcacagtttgccggaaacacagtagataacatgactattgcatcaagaatgacaatgtcaaacatggctatcgaaatgggtggaaaagcaggattaatcgcaccagacgataaaacaattaattatgtaaaaaatgcaatggaagctaacaacactgcaaaaccattcgaattagttcttggagacaaaaatgcagaatttgaagaaaaattcgaaattgatgtaagcaatcttgaacctgttatggcatgcccgcacaacgtggacaatgtaaaagctgttagagaagttgcaggaaccccaattgatcaggtattcattggttcatgtactaacggaagacttgaagatttgagagctgctttaaacgttattgaaaaacacggcggaatttcaaaagatatcagagttgttgtaacccctgcatcaagaagcatcatgcttgaagctattgatgaaggattaattaaaaaattctaccagtacggctgtgttgtaacaaatccatcatgttctgcatgtatgggtgcattatacggtcttttaggtcctggagaagttggaattgcaacttcaaacagaaacttcagaggaagagaaggttctttagaatcagacgtgtaccttgcatcgccaattactgctgcagcatgtgctgttaaaggagaaattgttgacccaagagatctctaa

SEQ ID NO: 958 - protein, 424 aa, Methanococcus maripaludis S2
MAMTLAEKILAKASGNSEVSPGDIVMAKVETAMVHDITGPLSVNTLKKEGISKVWDNEKIVIPFDHQIPADSINAAENHILMRNFVKEQNIKHFYDIREGVCHQVLPEKGHIVPGTVVVGADSHTCTYGAFGAFATGIGSTDMAAAFATGELWFKVPETLYFNITGELKPEVMSKDVILSIIGMVGADGATYKAAQFAGNTVDNMTIASRMTMSNMAIEMGGKAGLIAPDDKTINYVKNAMEANNTAKPFELVLGDKNAEFEEKFEIDVSNLEPVMACPHNVDNVKAVREVAGTPIDQVFIGSCTNGRLEDLRAALNVIEKHGGISKDIRVVVTPASRSIMLEAIDEGLIKKFYQYGCVVTNPSCSACMGALYGLLGPGEVGIATSNRNFRGREGSLESDVYLASPITAAACAVKGEIVDPRDL

SEQ ID NO: 959 - DNA, 1545 bp, Oryza sativa (japonica cultivar-group)
  CDS (1)..(1545)
atggcctccatctccgccgcctcccccgtcgctgggaaggccgccgccttcgcccacaagaacgagctcgccgccgccgccgtggcgccgtcgcagcagcagctgcagcggagggtgagtgggaggagggcgcgttcggggagggtccgcgccgtcgccacgcccgcccgcgccccccgcgccccgtcctccactggctcggtgaagagcgccatgacgatgacagagaagatcctggcgagggcgtcggagcgcgccagcttggagcccggggagaacgtgtgggtggacgtcgacgtgctgatgacgcacgacgtctgcggccctggcaccatcgggatcttcaagcgggagttcggggaggacgccaaggtttgggaccgagagaaggtggtcatcatcccggaccactacatcttcaccagcgatgagcgagcaaaccgaaatgttgatatcctcagggatttctgtatggagcagaacatcaagtacttctatgacatcaaggacctgagcaatttcaaagcaaatccagactacaagggtgtttgccacgttgctcttgctcaagagggtcattgcagaccaggcgaggttctccttggtactgattctcatacatgcaatgctggagcctttggccaatttgcaactggaattggaaacactgatgctggttttgtgatgggcactgggaaggctcttcttaaggtgcctccaactatcaggtttgtattagatggagaaatgccaccttatttacttgcaaaggatctgattttacaaattattggtgagatttctgtatctggcgcaacatacaaatccatggagtttgttggatcaactgtggaaagtctaaatatggaagagcgaatgacactgtgcaacatggttattgaagctggtggcaagaatggtgttgtgcctgccgatcaaactacatttaactatcttgagggcaagacatcagttgaatacgagcctgtctatagtgatgctcaggccagatttgttagtgactaccggtttgatgtatccaaattggagccagttattgccaagccacattcacctgacaaccgtgctctagcaagagagtgcaaagatgtcaagattgaccgggtctatatcggttcttgtactggaggtaaaactgaggacttctttgctgctgcgaaggtgttcttagcttcggggaagaaggttaaagttcccacttttctcgttccggcgacacaaaaggtgtggatggacatttatagcatccctgtaccaggagccggtggcaaaacttgctcacagatatttgaggaggctggttgtgatacaccagctagccctagttgtggtgcttgtttgggtggtcctcgtgatacatatgctcgcatgaatgaacctatggtgtgtgtgtcgacgacgaacaggaatttccccggcaggatggggcacaaggaagggcagatctacctggcttcgccgttcaccgcggcggcttcagccctcaccggatacgtcactgaccccagggacttcctgatgtaa

SEQ ID NO: 960 - protein, 514 aa, Oryza sativa (japonica cultivar-group)
MASISAASPVAGKAAAFAHKNELAAAAVAPSQQQLQRRVSGRRARSGRVRAVATPARAPRAPSSTGSVKSAMTMTEKILARASERASLEPGENVWVDVDVLMTHDVCGPGTIGIFKREFGEDAKVWDREKVVIIPDHYIFTSDERANRNVDILRDFCMEQNIKYFYDIKDLSNFKANPDYKGVCHVALAQEGHCRPGEVLLGTDSHTCNAGAFGQFATGIGNTDAGFVMGTGKALLKVPPTIRFVLDGEMPPYLLAKDLILQIIGEISVSGATYKSMEFVGSTVESLNMEERMTLCNMVIEAGGKNGVVPADQTTFNYLEGKTSVEYEPVYSDAQARFVSDYRFDVSKLEPVIAKPHSPDNRALARECKDVKIDRVYIGSCTGGKTEDFFAAAKVFLASGKKVKVPTFLVPATQKVWMDIYSIPVPGAGGKTCSQIFEEAGCDTPASPSCGACLGGPRDTYARMNEPMVCVSTTNRNFPGRMGHKEGQIYLASPFTAAASALTGYVTDPRDFLM

SEQ ID NO: 961 - DNA, 1251 bp, Dehalococcoides ethenogenes 195
  CDS (1)..(1251): transl_table=11
atgaacttagttgaaaaaatactggccgcccacagcggcaaaactcaggtcagcccgggtgattttataaacgccaaggtagacctggtgctggctaatgacattaccgcacctatagccgtaaaagagtttaagaagattggggtcagcaaagtatttgaccccaaaaagatagtttttgtgcctgaccattttgtacccaacaaggacattgcatctgccgaacaggtaaaaatggtgcgtgagtttgcccgtgagcagggtatactcttttttgaatgcggtaaaatgggtgttgagcatgtaatcctgcacgagcagggtctggtactgccgggggatattgtggtaggcgctgactcccatacctgcacttacggggcactgggcgcttttactaccggcatgggctcaaccgatatagccgccgccatggccaccggtgaggtttggatgaaagtcccccccaccatcaaatttaactattcgggtaagctgcccaaatggattggcggtaaagaccttattttgtttaccataggtcagataggggtagacggggctttgtactctgccatgtatttctgcggagaggctattgatgccctttccatggaaaaccgctttaccatgtccaatatggccatagaggccggcggcaaggcaggtcttttcagggttgacgaaaagactctggaatatgtgacccccagagccaaacgccagtatacggtttatgataatgatgctgatgcgtcttatgccaaaacatataactttgatatttccaagcttgagccgcaggtatcactgccgcattcaccggcaaatgcccgccccatcagccagattggtaaaataaaggttgaccaggttatcatcggctcatgcaccaacggcaggctggaagacctggccatatctgccaaactgcttgaagggaataaagtcagccctgatttgaggactattgttatacccggttcgcagcaggtctatctggatgccctgaaagccggctatattgaaacctttatcaatgccggggttgcggtttccactcccacctgcggtccttgcctcggcgggcatatgggtattttggccgccggtgaacgctgtctggcaactaccaaccgcaatttcgtagggcgtatgggcagccccaagagcgaagtatacctggccgggccggccgttgccgccgctaccgccatcaagggatatattgcccatcccgatgaaatttaa

SEQ ID NO: 962 - protein, 416 aa, Dehalococcoides ethenogenes 195
MNLVEKILAAHSGKTQVSPGDFINAKVDLVLANDITAPIAVKEFKKIGVSKVFDPKKIVFVPDHFVPNKDIASAEQVKMVREFAREQGILFFECGKMGVEHVILHEQGLVLPGDIVVGADSHTCTYGALGAFTTGMGSTDIAAAMATGEVWMKVPPTIKFNYSGKLPKWIGGKDLILFTIGQIGVDGALYSAMYFCGEAIDALSMENRFTMSNMAIEAGGKAGLFRVDEKTLEYVTPRAKRQYTVYDNDADASYAKTYNFDISKLEPQVSLPHSPANARPISQIGKIKVDQVIIGSCTNGRLEDLAISAKLLEGNKVSPDLRTIVIPGSQQVYLDALKAGYIETFINAGVAVSTPTCGPCLGGHMGILAAGERCLATTNRNFVGRMGSPKSEVYLAGPAVAAATAIKGYIAHPDEI

SEQ ID NO: 963 - DNA, 1242 bp, Methanosarcina barkeri str. fusaro
  CDS (1)..(1242): transl_table=11
ttgggaacaattagtgaaaaaatattttcccgggcaacgggagcagaggcaaaggcaaacgattttgtccttgcagatgttgattatgcaatggcgcatgacggcacctcagtacttgcagttaatgcttttaaggaaatggaaatgaagaaggtctgggacccctcaaggattgtaattcctttcgaccacatcgcgcctgcaaataatgagatatcagctactttgcaaaaggaaatccgggaatgggtaaaagaacaaggaattccgaatttttacgagcttggagaaggaatctgtcatcaagtactccccgaaaatggattcgcactgcctggaaaactggttgtgggcgctgattcgcattcctgcacctatggggctttcggagcttttgccacaggtgtaggagctaccgacatggctgaaatttttgccacaggtaagctctggtttaaggttcctgagagtttcaggttcacggtagaaggaaggcttggaaaaggggtttatgcaaaagatctgaccctttaccttattgggaagaccggaattgacggtgccacctataaggctgtagagttttacggacaggctatctccgaattatcggtttccggcagaatgacactctgcaacatggcaatcgaaatgggagcaaaaaccggaattgtgccaccggacgaaaaaacctttgccttcctgaaaaatcgggcggctgctccttatgatccggtttatgccgatcaggatgcagtctatgtaaaagaacccgtttactctgctgaagatatcgagcctcaggtagcctgtccgcatcaggttgacaacgtaaaacctgtgggagaagttgaaggtacccacatagaccaggttttcatagggacgtgcacaaatggcagacttgaagacctcgaggtcgcagcagcaatccttaaaggaaaaaaggttgcagtcaggactattgtaattcctgcatctcgcacgactctccttgcagcaattgaaaacggaacgatggaaattctgctcaaagcaggcattacgcttgcaacccctggctgcgggccctgtcttggcgctcaccagggagtgctcggtgaaggagaagtttgcctttcaaccgcaaaccgaaacttcaagggcaggatgggaaaaagtggttttatctacctggcatcccctgcaaccgcagcagcctcggcattggcaggagaaattacggatccaaggacagtttga

SEQ ID NO: 964 - protein, 413 aa, Methanosarcina barkeri str. fusaro
MGTISEKIFSRATGAEAKANDFVLADVDYAMAHDGTSVLAVNAFKEMEMKKVWDPSRIVIPFDHIAPANNEISATLQKEIREWVKEQGIPNFYELGEGICHQVLPENGFALPGKLVVGADSHSCTYGAFGAFATGVGATDMAEIFATGKLWFKVPESFRFTVEGRLGKGVYAKDLTLYLIGKTGIDGATYKAVEFYGQAISELSVSGRMTLCNMAIEMGAKTGIVPPDEKTFAFLKNRAAAPYDPVYADQDAVYVKEPVYSAEDIEPQVACPHQVDNVKPVGEVEGTHIDQVFIGTCTNGRLEDLEVAAAILKGKKVAVRTIVIPASRTTLLAAIENGTMEILLKAGITLATPGCGPCLGAHQGVLGEGEVCLSTANRNFKGRMGKSGFIYLASPATAAASALAGEITDPRTV

SEQ ID NO: 965 - DNA, 1296 bp, Methanosarcina barkeri str. fusaro
  CDS (1)..(1296): transl_table=11
atgaccgggatgtctggtaatgaaagttgtccgatgactgtttcggaaaagatcttttcgaaagcctccggaagtcccgtaaaagccggggatttcgtactggcaaatatagacctagcaatgactcacgacattacaggtccgctagcagtcaaaggcttctatgagattatgaaggacaaagaagagaagaaagtatgggatccaacgaaaatagtgatcgtatttgatcatcaggttcctgcggactccattaacgccaccgcaaatcatattatgctccgaaaatttgctgaagaacagggcattttaaattatgatgtatacgaaggagtttgccatcaggttcttcccgagaaaggacatgtcctgccaggagaccttattgttggctcggattcgcatacatgtgcgtatggtgcacttggtgcgttttctacaggtatagggtctactgatatggcagctgtttttgccactggcaaactctggttcaaggtaccagaaactttccgctttgaggtggaaggtaacctgccagaacgtgtttactccaaagaccttatcctccacctgataggtgacgtaggagtagaaggggccaggtatatggcagctgaatttggaggctcaacaattcactctctctcgatccccgaacgcatgactatgtccaatatggcaatcgagatgggcggaaaggcaggaatcatcgaagccgatgaagtgactgcaaactacctcaaagagcggattatgtattacgaattcgatccttattggaaatccgatgaagatgcaaaatatgtgggaatcaggcactacgacgtatctgacctggagccccaggtagcatgccctcaccacgtggataacgtaaaacccgtaaccgaggtagagggtacaaaacttgaccagatctttgtgggttcctgcacgaacggcagattcgaagatattaaaatcatggctgatattatgggcgatgagccagtagccaagggtgttcgcctgcttgtagttcctgcttcaagaactgagtacctgaaactcttgaaagccgggtatatagaaaagctcatgaatgcaggcgcaatcgtagaatccccgtgctgcggaccatgtatgggtggctctttcggcttgcttggtgcaggagaagtgggccttgcaacctcaaatcgtaacttcaaaggcagagaaggcagtcccgaatcttttgtatatctgtcttcccctgcaactgcaggagcatcagcccttacaggagaaatcactgatccaaggaaagtttga

SEQ ID NO: 966 - protein, 431 aa, Methanosarcina barkeri str. fusaro
MTGMSGNESCPMTVSEKIFSKASGSPVKAGDFVLANIDLAMTHDITGPLAVKGFYEIMKDKEEKKVWDPTKIVIVFDHQVPADSINATANHIMLRKFAEEQGILNYDVYEGVCHQVLPEKGHVLPGDLIVGSDSHTCAYGALGAFSTGIGSTDMAAVFATGKLWFKVPETFRFEVEGNLPERVYSKDLILHLIGDVGVEGARYMAAEFGGSTIHSLSIPERMTMSNMAIEMGGKAGIIEADEVTANYLKERIMYYEFDPYWKSDEDAKYVGIRHYDVSDLEPQVACPHHVDNVKPVTEVEGTKLDQIFVGSCTNGRFEDIKIMADIMGDEPVAKGVRLLVVPASRTEYLKLLKAGYIEKLMNAGAIVESPCCGPCMGGSFGLLGAGEVGLATSNRNFKGREGSPESFVYLSSPATAGASALTGEITDPRKV

SEQ ID NO: 967 - DNA, 1266 bp, Carboxydothermus hydrogenoformans Z-2901
  CDS (1)..(1266): transl_table=11
atggggatgacgatgaccgagaaaattcttgcctatcatgccggaaaagagcttgttgaaccgggagaattaatttcctgcaaggtagatgcggttttagccaacgacataaccggaccggtagcgataagcgagtttaaaaaaattggagtggactcggtttttgaccgggacagggtttatttggtgcccgaccattttacccccaataaagacattaaaagtgccgaacaggccaaaattttgcgggattttgctaaagagcaaaacctaacctattattttgaagtgggtaaaatgggaattgagcatgtgcttctgccggaagaagggttggtattgccgggagaggtgattatcggtgccgattcccatacctgtacttacggggggctgggggcttttgctaccggggtaggttcaactgaccttgcggcggcgatggccctcggggaaacctggtttaaagttccggaaagcattaagttttacctttacggggaaaagcttttaccttacgtttccgccaaagatatcattctgtttataatcgggcagattggtgttgacggggcgttatataaagcgatggagttcgccggttcggctttaaagcttatttcggttgaaggacggttaaccatggccaatatggctatagaagcgggagcaaaaaacggcatctttccggtggatgagcttaccctggaatatgtaaaaggccgggcaaaacgggagtttaaggtttttgccagcgatcccgatgccagatacgaagcggtttacgaaattaacgtggaagaaatcgaaccgcaggtagctcttccccatcttccggaaaatgccgtgccggtaaaggaggtatccggcaaggacattgatcaggtggtaattggttcgtgcaccaacggccgaattgaggatttacgggtggcggcggcgatcttaaaaggtaaaaaagtaaaggattatgtgcggtgcattattattcccggatcccagtcggtttaccggcaggcccttaaggaaggacttatagatattttccttgaagcgggggcggcggtttccactcctacctgtggcccctgcctgggcggccacatggggattttagccaagggagagagagcggttgctactaccaaccgcaattttgtgggcaggatggggcatgtagaatcggaagtttacctggcgggaccggcggtagcagcagcttcagccattgccggaaaaatcgttcatcccgaggaggtgcggtaa

SEQ ID NO: 968 - protein, 421 aa, Carboxydothermus hydrogenoformans Z-2901
MGMTMTEKILAYHAGKELVEPGELISCKVDAVLANDITGPVAISEFKKIGVDSVFDRDRVYLVPDHFTPNKDIKSAEQAKILRDFAKEQNLTYYFEVGKMGIEHVLLPEEGLVLPGEVIIGADSHTCTYGGLGAFATGVGSTDLAAAMALGETWFKVPESIKFYLYGEKLLPYVSAKDIILFIIGQIGVDGALYKAMEFAGSALKLISVEGRLTMANMAIEAGAKNGIFPVDELTLEYVKGRAKREFKVFASDPDARYEAVYEINVEEIEPQVALPHLPENAVPVKEVSGKDIDQVVIGSCTNGRIEDLRVAAAILKGKKVKDYVRCIIIPGSQSVYRQALKEGLIDIFLEAGAAVSTPTCGPCLGGHMGILAKGERAVATTNRNFVGRMGHVESEVYLAGPAVAAASAIAGKIVHPEEVR

SEQ ID NO: 969 - DNA, 1260 bp, Clostridium thermocellum ATCC 27405
  CDS (1)..(1260): transl_table=11
atgggaatgactatgacacagaaaatacttgcagatcacgcaggtcttgacaaggtttcaccgggtcagctcataaaagcaaaacttgacatggttttgggaaatgatataacaacacctgtggctgtgaaggaatttagaaaaattggcgtgaacaaggtgttcgatgtaaataaaatagcaattgttcctgaccattttacacccaacaaagacatcaagtccgcggagcaggtcaagtttatcagagaatttgcaagggaaatgggaatagtaaacttctttgaagtcggacaaatgggtgttgagcatgccctgcttccggaaaagggccttgtagttccgggagacgtggtaataggtgccgactcgcatacatgtacttatggagctttgggagctttctcaacgggaataggaagtaccgacatggctgccggaatggcaaccggagaagcatggtttaaagtgcccgaggccatgaaattcgtattgaagggaaaacccggaaaatgggtgagcggcaaggacataatccttcatataattggaatgataggggtggacggagctttgtaccgctccatggaattcacgggagacggtgtggcccacctttcaatggatgacaggtttgcaatggcgaacatggccattgaggcaggagcaaagaacggaatctttgaagttgacgaaaagacaattgagtatgtaaaagaacattccacaaggcagtacaaggtatacaaggcggatgaagacgcagaatatgtggccacttacgaaattgacctttcacaggtaaaacccacggttgcgttcccgcatcttccgtccaatacaagaaccattgacaatgtgggcaatatcaaaatcgaccaggttgtaataggatcatgtacaaacggaagaattgaggatttgagggtggccgcggaagtcctcaagggaagaaaagtgcacaaggacgtaagatgtataatcatccctgcaactcagaagatatggaaacaggcaatgaatgaaggtctgtttgacatatttattgatgcgggagctgcggtaagtactcccacctgcggaccgtgtcttggaggtcatatgggtattctggcaaaaggagaaagagctgtggcaaccaccaacagaaactttgtgggaagaatgggacatcccgaaagcgagatttacctcgcaagtccggctgtagctgcggcatcggctgttttgggaagaataggttcaccggatgaactttaa

SEQ ID NO: 970 - protein, 419 aa, Clostridium thermocellum ATCC 27405
MGMTMTQKILADHAGLDKVSPGQLIKAKLDMVLGNDITTPVAVKEFRKIGVNKVFDVNKIAIVPDHFTPNKDIKSAEQVKFIREFAREMGIVNFFEVGQMGVEHALLPEKGLVVPGDVVIGADSHTCTYGALGAFSTGIGSTDMAAGMATGEAWFKVPEAMKFVLKGKPGKWVSGKDIILHIIGMIGVDGALYRSMEFTGDGVAHLSMDDRFAMANMAIEAGAKNGIFEVDEKTIEYVKEHSTRQYKVYKADEDAEYVATYEIDLSQVKPTVAFPHLPSNTRTIDNVGNIKIDQVVIGSCTNGRIEDLRVAAEVLKGRKVHKDVRCIIIPATQKIWKQAMNEGLFDIFIDAGAAVSTPTCGPCLGGHMGILAKGERAVATTNRNFVGRMGHPESEIYLASPAVAAASAVLGRIGSPDEL

SEQ ID NO: 971 - DNA, 1299 bp, Prosthecochloris aestuarii DSM 271
  CDS (1)..(1299): transl_table=11
atggcacaaacgataacgcagaagattctggccagagctgccaatcgaaaatttgttaacgcaggtgaaaatgtctggctcaacgtcgatattctccttacgcatgacgtatgcggacctccgaccttcgatattttcaaggaaaaattcggcccggacgccaaagtatgggatcctgaaaaagtcgttgtactacccgaccactacattttcacagaaaacgaacacgcacaccgtaatatcgatcttctgcgcactttcgctgcagaacagaacctccccaactattacgatgtcggtaccgatcgttacaaaggagtctgccatgttgcgcttgcacaggaaggcttcaaccttcccggcaccgtcctcttcgggaccgattcccatacctgtacatcgggtgcgttcggcatgttcgggaccggtatcggcaacaccgatgccgccttcatcctgggaacaggaaaactctgggaaaaagtccctgaatcaatgaaattcgtttttgacggtgccatgccggactatctcaccgccaaagaccttatccttcagatcctcggcgatatcggtaccgatggggcgacctaccgggccatggaatttgacggttcggcagtctatcagcttcctgtcgaagagcgtatgacccttaccaatatggcaatcgaagccggcggcatgaacggcatcattgctgctgatgaggtcacagaagcctatgtcaaagcacgaaccagcaaaccatatgaaatcttccatagcgacccggatgccatctatcacagcatctaccactataatgttgaagaactcgagcctgtcgtagcccagccgcacagcccggacaaccgcgcaactgtacgaagcgttcagggcacgagaatcaccaaatcctacatcggctcatgcaccggaggcaagctttccgatttcaaaatggctgcaaaaattctcaacggccagcaggtgtcgatacaaacaaatattgttcctgcaaccgttgaagttgccaaaagtctggaaacagaacagtatgaaggcaagtcaatccgcaaagtcctggaagatgcgggctgcactatcgcacagccatcctgtgcagcatgccttggcggcccggccgatacctttgggcgttcggaagacaacgacctggtcgtatcaacgacaaacagaaacttccccggccgtatgggcagcaaaaaagcaggggtctatcttgcttcgcccctgacggccgctgcatccgccattaccggaaggcttaccgacccgagagagtttctctcttaa

SEQ ID NO: 972 - protein, 432 aa, Prosthecochloris aestuarii DSM 271
MAQTITQKILARAANRKFVNAGENVWLNVDILLTHDVCGPPTFDIFKEKFGPDAKVWDPEKVVVLPDHYIFTENEHAHRNIDLLRTFAAEQNLPNYYDVGTDRYKGVCHVALAQEGFNLPGTVLFGTDSHTCTSGAFGMFGTGIGNTDAAFILGTGKLWEKVPESMKFVFDGAMPDYLTAKDLILQILGDIGTDGATYRAMEFDGSAVYQLPVEERMTLTNMAIEAGGMNGIIAADEVTEAYVKARTSKPYEIFHSDPDAIYHSIYHYNVEELEPVVAQPHSPDNRATVRSVQGTRITKSYIGSCTGGKLSDFKMAAKILNGQQVSIQTNIVPATVEVAKSLETEQYEGKSIRKVLEDAGCTIAQPSCAACLGGPADTFGRSEDNDLVVSTTNRNFPGRMGSKKAGVYLASPLTAAASAITGRLTDPREFLS

SEQ ID NO: 973 - DNA, 1320 bp, Trichodesmium erythraeum IMS101
  CDS (1)..(1320): transl_table=11
atgacaatgaccatggtagaaaaaatcctggccaaagcatcaggaaaatctactgttaaccctggagaaaatatttgggtgaatgttgatgtattaatgacccatgatgtttgtggtcctggtaccattggcattttcaaacgagaatttggtgaaaatgccaaagtttgggacaaagaaaaaattgtcctgataccagaccactatatttttactgccgacgaacgggcaaaccgcaacgtagatattttgcgagactttgcccaagaacaaaacatcaaatatttctacgacattattgaacggtcaaacttcaaagccaacccagactacaaaggagtttgccatgtagccctggcccaagaaggtcatactcgtccgggagaagtcctatttggtactgactcccacacttgtaacgcaggagcttttggagaatttgctacaggtatcggtaatacagatgctgcctttattgcaggtacaggcaaactattggtcaaagtgccagcaactatgcgctttatcttgaatggggaaatgcccaattatttattagcaaaagatttgatacttcaaattattggagatatttctgtatcaggtgctacttatagaacaatggaatttgctggggaaactgttggacaaatgaccatggaagaacggatgaccctatgcaatatggttattgaagcggggggtaaaaatggagttattgctcccgatgagatgacctttgaatatttgcggggtagaaccgataaaccatttgagtcattttattctgataaaaatgccgaattttatagcgatcgctcctatgatgtcacaaaattagaacctgtagtagctaaaccccattctccagataataaggaacttgcccgtaactgtcaggatgttaaaattgaccgagtttatattggttcctgtactggaggaaaaacttctgactttcttcatgcagcgaaacttattaaagatcatcaagtgaaagttccgacttatttagtaccagcaactcagaaagtttatgaggatttatttattattaaacatgatggaaaaactctctcagaaatatttttagatgctggttgtattgaacctgcagctccatcttgtgccgcttgtttaggaggaccaaaagatacatttgggcgattaaatgaaccggaaatttgtgtgtctacaactaatcgtaattttcctggtcgaatgggaaataaacaggcacaagtctatttagcttctccctatacagcagcagcttcagctttaactggatatgttactgacccaagagaatttatgtaa

SEQ ID NO: 974 - protein, 439 aa, Trichodesmium erythraeum IMS101
MTMTMVEKILAKASGKSTVNPGENIWVNVDVLMTHDVCGPGTIGIFKREFGENAKVWDKEKIVLIPDHYIFTADERANRNVDILRDFAQEQNIKYFYDIIERSNFKANPDYKGVCHVALAQEGHTRPGEVLFGTDSHTCNAGAFGEFATGIGNTDAAFIAGTGKLLVKVPATMRFILNGEMPNYLLAKDLILQIIGDISVSGATYRTMEFAGETVGQMTMEERMTLCNMVIEAGGKNGVIAPDEMTFEYLRGRTDKPFESFYSDKNAEFYSDRSYDVTKLEPVVAKPHSPDNKELARNCQDVKIDRVYIGSCTGGKTSDFLHAAKLIKDHQVKVPTYLVPATQKVYEDLFIIKHDGKTLSEIFLDAGCIEPAAPSCAACLGGPKDTFGRLNEPEICVSTTNRNFPGRMGNKQAQVYLASPYTAAASALTGYVTDPREFM

SEQ ID NO: 975 - DNA, 1275 bp, Methanosarcina acetivorans
  CDS (1)..(1275): transl_table=11
ttgttatttgattatcggaaaggaggcttatttctgggaacaatcagcgagaaaatcttttcccgggcagcgggaacagaggcaaaagctaacgattttgtgctggcagatgtggactatgcaatggcgcatgacggcacatcggtacttgccgtgaatgcttttaaggaaatggagatggaaaaggtctgggacccttcaaggatcgtagtcccctttgaccacatcgcgcctgcgaataatgagacctcagccaccctgcagagagagatcagggaatgggtaaaggagcaggggatccctaacttctatgaggtcggggaagggatctgtcaccaggtccttccggaaaacggttttgcattgcccggaaagctggttgttggggctgattcgcattcctgcacgtacggggcttttggagcttttgcaacaggggtaggggctaccgatatggctgaaatctttgctacgggaaaactctggtttaaggttccggaaagcttcaggatgacggttgaagggagccttcggaaaggggtctatgcaaaggatctgactctttacctgatcggaaagaccggaattgccggggcgacctataaagcagttgagttttacgggcaggcaatccgcgaacttacggttgctggcaggatgacgctctgcaatatggcaattgagatgggcgcaaagaccgggatcgtccctccggacgaaaagaccttcgagttcctgaaaaacagggcagcagctacttatgaacctgtctatgccgacccggatgctgtttatctggaagagttcacttatgatgccgacgatatcgaaccccaggttgcctgcccgcatcaggtggataatgtaaagcccgtaggagaggttgaaggcactcatgtagaccaggtctttatcgggacgtgcacgaacggcaggcttgaagacctcgaggtcgcagcagcagtcctgaaaggaaaacaggttgcagtcaggacaattgtgatccctgcctctcgcaccaccctccttgcagcaatcgaaaacgggacaatggaaactctgctgaaagccggggtaacccttgcaaccccgggctgcggaccctgcctcggtgcccatcagggggtgctcggagaaggcgaggtctgcgtttcaaccgcaaacaggaacttcaaaggcaggatgggaaaaggcggttttatttatcttgcatctccagcaactgcagcagcctcggccctgacaggagaaatcaccgatccgaggacagtttga

SEQ ID NO: 976 - protein, 424 aa, Methanosarcina acetivorans
MLFDYRKGGLFLGTISEKIFSRAAGTEAKANDFVLADVDYAMAHDGTSVLAVNAFKEMEMEKVWDPSRIVVPFDHIAPANNETSATLQREIREWVKEQGIPNFYEVGEGICHQVLPENGFALPGKLVVGADSHSCTYGAFGAFATGVGATDMAEIFATGKLWFKVPESFRMTVEGSLRKGVYAKDLTLYLIGKTGIAGATYKAVEFYGQAIRELTVAGRMTLCNMAIEMGAKTGIVPPDEKTFEFLKNRAAATYEPVYADPDAVYLEEFTYDADDIEPQVACPHQVDNVKPVGEVEGTHVDQVFIGTCTNGRLEDLEVAAAVLKGKQVAVRTIVIPASRTTLLAAIENGTMETLLKAGVTLATPGCGPCLGAHQGVLGEGEVCVSTANRNFKGRMGKGGFIYLASPATAAASALTGEITDPRTV

SEQ ID NO: 977 - DNA, 1257 bp, Methanopyrus kandleri
  CDS (1)..(1257): transl_table=11
gtggggaagacgatggccgagaagatactgtctcgagcgtccggagaagacgctgaggcgggggatatcgtcgtcgccaacatcgacgtggcgatggtccacgatatcacgggcccgatcacggttcagcggctcgaggagatgggagtcgagcgcgtgtgggacccgtccaagatcgtcgtgctgttcgaccatcaggtgcccgcggactccgtggaagccgcggagaaccacaaaataatgcgggagttcgtcgaagaacagggtatcgagcacttctacgacgttcgggagggtgtctgtcaccaggtcctccccgagaagggtcacgtgcgtcccggggacgtgatcgtgggggccgactctcacacctgcacccacggagcgctcggagccttcgccaccgggatcggttccaccgacatggcggcggtctttgcgaccggtaagctgtggttccgcgtcccggaaacttaccgcgtagagatcacgggagagcttccggaaggtgtgtacgcgaaggatgtcgtgctcaaggtgacgggagaaatcggtgccgacggtgcgacgtacatggcgatcgagtaccacggcgaggtcgtccgagagatgtccgtatcggaccgtatgtgcctgtgcaacatggcgatcgagatgggagcgaagacgggaatggttccacccgacgagaagacgctcgagtacgtcaagaagcgtgcgggtacggaagggcgcccggttgagccggacccggacgcccggtacgaggccgagctgaccttggacgtgagcgacctcgagccgcaggtcgcgaagccgttctctccggacaacgtggtgcccgtgggggaggtcgaaggtatcgcgatcgaccaagtcttcatcggttcctgtaccaacggtcggtacgaggacctgaaggttgcggcggaggtacttgaaggcgaggaggtccacgacgacgtccggctgatcgtcatcccggcgtcgagggaagtttaccaccggacgctcaaggacggcgtgctcgaagtactccacgaggcgggggcactgatctgcccgccgaactgcggtccgtgcctgggtggccatatgggagtgctagcggaaggcgagcgatgcgtagcgacgtccaacaggaactttccgggtaggatgggacaccgcgagtcggaagtgtatctagccagtccggcgacggccgccgccagcgctatcgagggtgagatcaccgaccctcgtccctacctctaa

SEQ ID NO: 978 - protein, 418 aa, Methanopyrus kandleri
MGKTMAEKILSRASGEDAEAGDIVVANIDVAMVHDITGPITVQRLEEMGVERVWDPSKIVVLFDHQVPADSVEAAENHKIMREFVEEQGIEHFYDVREGVCHQVLPEKGHVRPGDVIVGADSHTCTHGALGAFATGIGSTDMAAVFATGKLWFRVPETYRVEITGELPEGVYAKDVVLKVTGEIGADGATYMAIEYHGEVVREMSVSDRMCLCNMAIEMGAKTGMVPPDEKTLEYVKKRAGTEGRPVEPDPDARYEAELTLDVSDLEPQVAKPFSPDNVVPVGEVEGIAIDQVFIGSCTNGRYEDLKVAAEVLEGEEVHDDVRLIVIPASREVYHRTLKDGVLEVLHEAGALICPPNCGPCLGGHMGVLAEGERCVATSNRNFPGRMGHRESEVYLASPATAAASAIEGEITDPRPYL

SEQ ID NO: 979 - DNA, 1260 bp, Methanobacterium thermoautotrophicum
  CDS (1)..(1260): transl_table=11
atgtctatgactgtttctgagaagatacttgccagggcttcaggtaaggatagggtggaagccggtgaaatagttatggcggatatagatgttgcgatgacccatgacctcacaggtcccctgtcggttgagtccttcagggccataggtgaggatagggtctgggaccctgaaaaaatcgttgtgatattcgatcaccaggtccctgcagactccattgaagccgcccagaaccacatgataatgagggacttcgtagaggagcagggaatacggaacttctatgacgttcgtgaaggcgtctgtcaccaggtgctccctgagaagggccatgttgtgcccggtgaggtcgtggtgggtacagactcccacacctgcacccacggggccctcggagccttcgcaacgggtataggttcaacagatatggccatggtatttgcaactgggaaactttggttcagggtccctgaaaccctgagatttgatgtgaggggaaaactcagggagcacgtctatgcaaaggacgtcatactgaacataatagggagggttggtgccgatggcgcaacctacatggcctgtgaatttgcaggtgaaaccgttgcagaaatgagtgtatccgaccgtatggtcctctcaaatatggcaatagagatgggtggtaagacaggaatcgtggaacctgacgaaaaaaccctgaactatgtcaggaggaggtcaggtaaaccctggagggtcttcaaaacagaccctgacgctccatccctcagtgtcatggaggtcgacgtgagtgaccttgaaccccaggtcgcctgtccacacaatgtggacaatgtgaaacccgtcaccgaggtggaggggacagagatagaccaggtcttccttggttcatgcacaaatggaaggctcagtgacctcagggacgctgccgccatactgaagaacaggaaggtctcagacagtgtcaggatgctcgtcatacctgcctccagggaggtctaccgcagggcccttgacgagggactgattgagatattcgtggatgcaggagccctggtatgcaacccctgctgcggcccctgcctcggaggacacgttggactggtcggaccaggggaggtgagcctctcaacctcaaacaggaacttcagggggaggcagggaagccccgaagcagaggtctacctctcctcagcagccgtggcagccgcatctgcagtgaagggcagcataacccaccctgggagtctgaagtag

SEQ ID NO: 980 - protein, 419 aa, Methanobacterium thermoautotrophicum
MSMTVSEKILARASGKDRVEAGEIVMADIDVAMTHDLTGPLSVESFRAIGEDRVWDPEKIVVIFDHQVPADSIEAAQNHMIMRDFVEEQGIRNFYDVREGVCHQVLPEKGHVVPGEVVVGTDSHTCTHGALGAFATGIGSTDMAMVFATGKLWFRVPETLRFDVRGKLREHVYAKDVILNIIGRVGADGATYMACEFAGETVAEMSVSDRMVLSNMAIEMGGKTGIVEPDEKTLNYVRRRSGKPWRVFKTDPDAPSLSVMEVDVSDLEPQVACPHNVDNVKPVTEVEGTEIDQVFLGSCTNGRLSDLRDAAAILKNRKVSDSVRMLVIPASREVYRRALDEGLIEIFVDAGALVCNPCCGPCLGGHVGLVGPGEVSLSTSNRNFRGRQGSPEAEVYLSSAAVAAASAVKGSITHPGSLK

SEQ ID NO: 981 - DNA, 1272 bp, Pyrococcus abyssi
  CDS (1)..(1272): transl_table=11
atgggaatgacgatagctgagaagattttagcagatcactccgaaagggaggaggttaaacctggagaaatagtcatggccaagttggatttcgtgtttggaaacgatgtaacgatgcctctagctataaagaagtttagggaacttggagttaagagggttttcgatagggaaaggatagcgatagttctagatcacttcacgccaaacaaggatataaagagcgccgagcagtgcaaatcttcaagggagttcgccaaagagatgggaataaaatggtttttcgaaggaggaagtgtcggagttgaacactgcttacttccagagctaggtcttgttcttcctggagacttaattatcggtgcagattcgcacacatgcacgtatggtgctctcggtgccttcgcaacaggagttgggagtactgatttagccgtcgcgatggctactggggaagcctggttcagggttcccgaaaccatgaaattcatctacgagggagagctccaaccttatgtaactggtaaggatttgatccttcacacaatcggagatataggagtaaatggagccctatacaaggtcatggaattcagtggaagcgtaatagaggagctctcggtggaacagaggatgaccatgagtaatatggctatagaagctggagcaaagactgggataatagaaccggataagaaaaccctagattacgttaaggagagagcaaaaaggaagtttaaggtttacaaaagcgacgaggatgctaagtactacaaagttatcgagtacgacgttaccaactgggaacctgtagttgcctttccccatttaccggagaacacggttccaataagtaaggctgcaaagatgaacataaagatagatcaggtcttcataggttcttgcacaaatgggagaatagaagatctaagaatggcggctgaaattttagaagggcaaaaagtcgccaagtgggttaggttaatcgtcattccgtgctctccaacggtttactggaaagccttgaaggaaggtttgatagagatattcttggaggccggagctgtaataggacctcccacgtgtggaccctgtctcggaggtcacatgggagtgcttgcaagtggtgaaagggctgtctctacaactaacaggaacttcgttgggagaatggggcatccaaagagcgaggtttacttagctaacccatacgtcgccgctgcttcagctgttttgggtaggatagcatccccagaggaggtggtaaaatga

SEQ ID NO: 982 - protein, 423 aa, Pyrococcus abyssi
MGMTIAEKILADHSEREEVKPGEIVMAKLDFVFGNDVTMPLAIKKFRELGVKRVFDRERIAIVLDHFTPNKDIKSAEQCKSSREFAKEMGIKWFFEGGSVGVEHCLLPELGLVLPGDLIIGADSHTCTYGALGAFATGVGSTDLAVAMATGEAWFRVPETMKFIYEGELQPYVTGKDLILHTIGDIGVNGALYKVMEFSGSVIEELSVEQRMTMSNMAIEAGAKTGIIEPDKKTLDYVKERAKRKFKVYKSDEDAKYYKVIEYDVTNWEPVVAFPHLPENTVPISKAAKMNIKIDQVFIGSCTNGRIEDLRMAAEILEGQKVAKWVRLIVIPCSPTVYWKALKEGLIEIFLEAGAVIGPPTCGPCLGGHMGVLASGERAVSTTNRNFVGRMGHPKSEVYLANPYVAAASAVLGRIASPEEVVK

SEQ ID NO: 983 - DNA, 1275 bp, Pyrococcus furiosus
  CDS (1)..(1275): transl_table=11
atgggcggaatgacaatagctgaaaaaattttggcaactcatgccggaaaggaagaggtaaaacctggagagatagttttggcaaaagtggacttcatgtttgggaatgatgtaacaacccccttagccataaaaacgtttagaaagattggagtggagaaggtttttgacccagaaagaatagcaatagttttagatcacttcactccaaataaagatatcaaagctgcggagcaatgtaaattctcacgagaatttgccagagaacagggaatcaagtggttctttgagggaggaaacgttggtgtcgagcattgtttactccctgagttaggattagttctcccaggagagctaattattggagcagattcccacacttgcacttatggagccctgggtgcctttgcaactggagttggtagtactgacttagcagttgcaatggcaacaggagaggcgtggttcagggttcccgaaacgataaaattcgtttatgaaggagaccttcaaccctgggtaactagtaaggatctcatactttacacaatcggagacataggggttaatggagccctctacaaagtcatggaattttcgggagaagttatagagaagctttccgtggaacagaggatgacgatgactaatatggccatagaggccggagcaaagactgggataatagagccggataagaagactatagagtacgtaaaggggagggccaagagagagtacaagatctacaagagcgatgaagatgcaaagtactacaaggttattgagtatgacgttagtaaaattgaacctcaagttgcctttccacacttacccgaaaacacggttcccatcagcaaggccgcaaagatgaacataaagatagaccaagttgtcattggctcatgtacgaatggtaggttggaagaccttagaatggccgctgaagttttagaaggccagaaagtggccccctgggtaaggcttatcattcttccatgttcaccgactgtgtatttcaaggcaatgaaggagggcctcttggagattttcctggaggcaggagctgttatagggcctccaacttgtggaccgtgcctaggaggtcacatgggtattctggcgagtggtgagagagctgtatctacaacaaacaggaactttgttggaagaatgggtcacccaaagagcgaagtttacttggcaagtccctatgtagctgcagcttcggctattcttggtagaattgcctctccagaggaggtggtaaaatga

SEQ ID NO: 984 - protein, 424 aa, Pyrococcus furiosus
MGGMTIAEKILATHAGKEEVKPGEIVLAKVDFMFGNDVTTPLAIKTFRKIGVEKVFDPERIAIVLDHFTPNKDIKAAEQCKFSREFAREQGIKWFFEGGNVGVEHCLLPELGLVLPGELIIGADSHTCTYGALGAFATGVGSTDLAVAMATGEAWFRVPETIKFVYEGDLQPWVTSKDLILYTIGDIGVNGALYKVMEFSGEVIEKLSVEQRMTMTNMAIEAGAKTGIIEPDKKTIEYVKGRAKREYKIYKSDEDAKYYKVIEYDVSKIEPQVAFPHLPENTVPISKAAKMNIKIDQVVIGSCTNGRLEDLRMAAEVLEGQKVAPWVRLIILPCSPTVYFKAMKEGLLEIFLEAGAVIGPPTCGPCLGGHMGILASGERAVSTTNRNFVGRMGHPKSEVYLASPYVAAASAILGRIASPEEVVK

SEQ ID NO: 985 - DNA, 1263 bp, Methanosarcina acetivorans
  CDS (1)..(1263): transl_table=11
atgaccgtttcggagaagatcttttcgaaggcctccggaactcccgtgaaagccggggatttcgtactggcaaacatagacctggcaatgacccacgacatcacaggtccgctggcagtccagggcttttacgaaatcatgagagatgaagaagaaaaaaaagtctgggaccccagcaaaatcgtaatcattttcgatcaccaggtccctgcagactcaattaatgccgcagaaaaccacatcatgctcaggaagtttgcaaaagagcagggcattttaaattatgatgtgtacgagggagtctgccatcaggttctgcccgaaaaagggcatgtactgcccggagaccttattgtgggctctgactctcatacctgcgcatacggttctttaggggcattttctaccggtataggatctactgacatggcagctgtttttgctacaggcaaactctggttcagggttcccgagaccttccgttttgaagttgaaggcaaactgccagagcgcgtttactccaaagaccttatcctgcacctcatcggggatgtaggagtggaaggtgccagatatatggcagccgagtatgcaggttcgaccatccgttccctttccattcccgagcgcatgaccatctccaacatggcaatagagatgggaggaaaggcaggaattatcgaagccgacgaagttaccgaagcataccttcaggagaggattccgggctacaaacttgacccatactggaagtccgatgaagaggctaaatacctggacatcaggcactacgatgtctccgaccttgaaccccaggtagcctgtccccacaatgtcgataacgtgaagtcggtaagtgaagttgagggcacgaagcttgaccaggtctttatgggctcctgcacgaatggcaggtttgaagacataaagataatggctgatatcatgggcgacgaacctgtagcaaaaggtgtgcgtctccttgttgtgcctgcttcgaaaaccgaatatatgaaactgttaaaagccggatatgttgaaaaactcatgaatgccggcgcaatcgtagaagctccctgctgcggaccctgtatgggtggctctttcggcctgctcggcccgggagaagtcgggcttgcaacctctaaccgtaacttcaagggtagagaaggcagcgccgaatcgttcgtctacctttcttctcctgcaaccgcaggagcatccgcccttacgggagaaattaccgaccccaggaaggtttga

SEQ ID NO: 986 - protein, 420 aa, Methanosarcina acetivorans
MTVSEKIFSKASGTPVKAGDFVLANIDLAMTHDITGPLAVQGFYEIMRDEEEKKVWDPSKIVIIFDHQVPADSINAAENHIMLRKFAKEQGILNYDVYEGVCHQVLPEKGHVLPGDLIVGSDSHTCAYGSLGAFSTGIGSTDMAAVFATGKLWFRVPETFRFEVEGKLPERVYSKDLILHLIGDVGVEGARYMAAEYAGSTIRSLSIPERMTISNMAIEMGGKAGIIEADEVTEAYLQERIPGYKLDPYWKSDEEAKYLDIRHYDVSDLEPQVACPHNVDNVKSVSEVEGTKLDQVFMGSCTNGRFEDIKIMADIMGDEPVAKGVRLLVVPASKTEYMKLLKAGYVEKLMNAGAIVEAPCCGPCMGGSFGLLGPGEVGLATSNRNFKGREGSAESFVYLSSPATAGASALTGEITDPRKV

SEQ ID NO: 987 - DNA, 1275 bp, Methanococcus jannaschii
  CDS (1)..(1275): transl_table=11
atgggaatgacaattgtagagaagatattagcaaaggcgtctggaaagaaggaagttagtcctggagatatagtgatggcaaacattgatgtagcaatggttcatgatattacagggcctttaacagtcaatacattaaaggagtatggaattgaaaaagtttggaatccagaaaagatagttattttatttgaccaccaagttcctgctgatagtataaaagcggctgaaaaccatatattaatgagaaagttcgtaaaagaacagggtattaaatacttctacgatattagagagggagtttgtcaccaagttttaccagagaaaggacatgtagctccaggagaggtagttgttggagctgattcacacacatgcacacatggagcttttggtgcttttgctaccggtataggttcaactgacatggctcacgtatttgcaacaggtaaattgtggtttaaagttccagaaacaatatacttcaacattactggagatttacaaccttacgttacttcaaaggatgttattctaagcattataggagaagttggtgttgatggggctacatataaagcatgccagtttggtggagaaaccgttaaaaagatgtccatagcatcaagaatgacaatgacaaacatggctattgagatggggggaaaaacaggaattatagagccagatgagaaaaccatccaatatgtaaaagaggctatgaagaaacatggaactgagagaccatttgaggtaataaaaggagatgaagatgctgaatttgcagaggtttatgaaattgaggcagataaaatagagccagtatttgcatgcccacacaatgtagataatgttaaacaggcgagagaagtggctggaaagcctatagaccaggtgtttattggttcatgtacgaacggaagattggaagatttaagaatggctattaagattattgagaagcatggtggaattgctgatgatgttagggttgttgtaactccagcttcaagggaagagtatctaaaagcattaaaagagggaataattgagaaattcttaaagtatggatgtgttgttacaaatccttcatgctctgcttgtatgggttcattgtatggtgttttaggtcctggagaggtctgtgtctcaacctcaaacagaaacttcagaggaaggcagggttcattagaagcagagatttatttagcatcaccaataactgctgctgcatgtgctgttaaaggagaacttgttgacccaagggatttataa

SEQ ID NO: 988 - protein, 424 aa, Methanococcus jannaschii
MGMTIVEKILAKASGKKEVSPGDIVMANIDVAMVHDITGPLTVNTLKEYGIEKVWNPEKIVILFDHQVPADSIKAAENHILMRKFVKEQGIKYFYDIREGVCHQVLPEKGHVAPGEVVVGADSHTCTHGAFGAFATGIGSTDMAHVFATGKLWFKVPETIYFNITGDLQPYVTSKDVILSIIGEVGVDGATYKACQFGGETVKKMSIASRMTMTNMAIEMGGKTGIIEPDEKTIQYVKEAMKKHGTERPFEVIKGDEDAEFAEVYEIEADKIEPVFACPHNVDNVKQAREVAGKPIDQVFIGSCTNGRLEDLRMAIKIIEKHGGIADDVRVVVTPASREEYLKALKEGIIEKFLKYGCVVTNPSCSACMGSLYGVLGPGEVCVSTSNRNFRGRQGSLEAEIYLASPITAAACAVKGELVDPRDL

SEQ ID NO: 989 - DNA, 1299 bp, Aquifex aeolicus
  CDS (1)..(1299): transl_table=11
atgggaatgactataaccgagaagattctggcggaacacgctggtaagaaggaagtccaccccggagaactcataactgcaaagatagacctcgcaatggcaaacgatgtgaccgcaccccttgccataaagatacttgagaagtacggaatagataaggtctttgaccctgagaggatagcccttgttctctcacacttcgttcccgcaaaggacataaagtccgctgagcaggcaaagatagtaagagaattcgtaaaaaagcacggtataaagtggttctttgaagagggagaaggtatagaacacgccatactccccgagcaaggactcgtcgttcccggggacctcgttgtaggtgcggactcccacacctgcacttacggagctctcggagcctttgcaacgggggtcggttccaccgatatagcctacgctatggctaccggagaagtttggctcagagttcccgaaagtatgaagttcatcttctacggaaaactaaaaccatgggtgatgggaaaggacctaatcctctacacgatagggcaaataggggttgacggagcactctacagggctatggaatttgacggagagaccataagaaacctttctatggaacagaggtttactatagcaaacatggcgatagaagcgggtggaaagagcggaataatctctcctgatgaaaaaacgatagaatacgtaaaacaaagggcaaagagaccatggaaagtttaccagagcgaccctgacgctgagtaccactccgtttacgagtgggacgcttctcagatagaacccttagtagcgtggccctacctaccttcaaacgtgcatcccgtttctgaatccacccatataacgatagaccaggcatttataggctcctgcacaaacggaagaatagaggacctgagagttgcagcaaaggtgtttgaagctgcgctaaagcaaggaaagaaagttcacccttacgtgaggtgcatagtaattcccgcgtccaaggctatatacaagcaagctttgaaagaaggactcatagatatctttatggaagccggttgcgtggtttctacttctacgtgcggtccctgccttggtggacacatgggagtgcttgcggaaggtgaaaggtgtatatccacatctaacagaaacttccccggaaggatgggtcatcctaagagcgaaagctacctcgcaaaccctgccgtggtcgctgcgagtgcaataatgggaagaattgcccaccccgacgaggtggtgaaagccgaaacccttgcgggtgtttaa

SEQ ID NO: 990 - protein, 432 aa, Aquifex aeolicus
MGMTITEKILAEHAGKKEVHPGELITAKIDLAMANDVTAPLAIKILEKYGIDKVFDPERIALVLSHFVPAKDIKSAEQAKIVREFVKKHGIKWFFEEGEGIEHAILPEQGLVVPGDLVVGADSHTCTYGALGAFATGVGSTDIAYAMATGEVWLRVPESMKFIFYGKLKPWVMGKDLILYTIGQIGVDGALYRAMEFDGETIRNLSMEQRFTIANMAIEAGGKSGIISPDEKTIEYVKQRAKRPWKVYQSDPDAEYHSVYEWDASQIEPLVAWPYLPSNVHPVSESTHITIDQAFIGSCTNGRIEDLRVAAKVFEAALKQGKKVHPYVRCIVIPASKAIYKQALKEGLIDIFMEAGCVVSTSTCGPCLGGHMGVLAEGERCISTSNRNFPGRMGHPKSESYLANPAVVAASAIMGRIAHPDEVVKAETLAGV

SEQ ID NO: 991 - DNA, 1401 bp, Erwinia carotovora subsp
  CDS (1)..(1401)
atgggtaagacgttatatcaaaaattgttcgatgcgcacatcgttcatgaagcgccgaacgaaacaccgttgctgtatatcgacaggcatctggtgcatgaagtgacctctccgcaggcgttcgacggcctgcgtgcgatgggccgcaaggttcgtcaaccggggaaaaccttcgcgaccatggaccacaacgtgtccacgcagaccaaggacatcaacgccagtggtgagatggcccgcattcagatgcaggagctaatcaagaactgtgcggagtttggcgttcaattgtatgacctgaaccacccgtatcaaggcatcgttcacgttatcggcccagaacaagggatgacgctgccgggtatgaccatcgtttgcggtgactcacacaccgcaacgcacggcgcatttggctcactggccttcggcatcggtacgtcggaagtggaacatgtgctggcgacgcaaaccctgaaacagggtcgcgccaaaaccatgaagattgaagtcaccggtgatgctgctcatggcatcaccgcgaaagacatcgtgctggcgatcatcggtaaaaccggtagcgcgggcggcaccggccatgtggttgaattctgtggtaaagctattcgtgcgctgagcatggaaggccgtatgacgctgtgcaacatggccattgagatgggcgcgaaggccggtctggttgcaccagatgaaaccacgtttaactatctgaaaggtcgtcagtttgccccgaaagacgcaaactgggatgccgccgttgcatactggagcacgctgaaatccgatgatgacgcgcagttcgacactatcgtcacgctggacgccgcgcaaattgcaccacaggtcacctggggcaccaaccccggtcaggttatcgccgttaatcaggaaatccctaaccctgattctttcagcgatccggtagaacgcgcctctgccgccaaagctctggcctatatggatctgcaacccggcattaaactgaccgacgtgaagatcgataaagtcttcattggttcttgcaccaactcacgtattgaagatttgcgtgcggcggcagaaatcgccaaagggcgtaaagttgccgcaggcgttcaggctatcgtcgtacccggctccggcccggtaaaaaccatggcggagctggaagggctggataaagtgttcatcgaagcaggttttgagtggcgcttaccgggctgctccatgtgtctggcgatgaacaatgaccgcctgaaccccggcgagcgttgcgcatcaaccagcaaccgtaattttgaaggccgtcaggggcgcgctggacgcacccatctggtcagcccggcgatggctgctgcagctgcggtgacgggtcgctttgccgacgtccgcgagttgaattaa

SEQ ID NO: 992 - protein, 466 aa, Erwinia carotovora subsp
MGKTLYQKLFDAHIVHEAPNETPLLYIDRHLVHEVTSPQAFDGLRAMGRKVRQPGKTFATMDHNVSTQTKDINASGEMARIQMQELIKNCAEFGVQLYDLNHPYQGIVHVIGPEQGMTLPGMTIVCGDSHTATHGAFGSLAFGIGTSEVEHVLATQTLKQGRAKTMKIEVTGDAAHGITAKDIVLAIIGKTGSAGGTGHVVEFCGKAIRALSMEGRMTLCNMAIEMGAKAGLVAPDETTFNYLKGRQFAPKDANWDAAVAYWSTLKSDDDAQFDTIVTLDAAQIAPQVTWGTNPGQVIAVNQEIPNPDSFSDPVERASAAKALAYMDLQPGIKLTDVKIDKVFIGSCTNSRIEDLRAAAEIAKGRKVAAGVQAIVVPGSGPVKTMAELEGLDKVFIEAGFEWRLPGCSMCLAMNNDRLNPGERCASTSNRNFEGRQGRAGRTHLVSPAMAAAAAVTGRFADVRELN

SEQ ID NO: 993 - DNA, 1904 bp, Brassica napus
  CDS (156)..(1673)
attgcggttggcacgcttatcagtagtgaagatgtaatggtctggaataacaacaatcttctctgggtcccaaaccttaggtttgagttacacacacgcccccaacttttctacaacataacgcagcgcacacacccacaaggaggaagggaacaatggcttcctctgtaatctcttcatctcctttcctctgcaaatccgcccagcagaaggatttggggttccctaaatcgtcgcagatttcggttcacagatgtcagaagagagcgatttctcggaagatcgtctccgtcatggcgccgcagcgatcatccagcgccactggatcggtgaaaactgggatgacgatgacggagaagattcttgccaaggcagcagagaaatcacaagtggtgcctggtgataacatctgggttaacgttgacgttctcatgactcatgatgtctgtggccctggtgcttttggtatcttcaagagagagttcggtgaaaaagctaaggtttgggactcagagaagattgttgttattccagaccattacatcttcactactgataagcgtgccaaccgcaatgtcgacattatgagggaacattgcagggaacagaacatcaagtatttctatgatatcaccgaccttggagattttcgggctaatcctgactacaaaggtgtttgccatgtggcgcttgcacaagaaggtcattgcaggccaggagaggttttgttaggaacagactcgcacacatgtactgctggagcgtttggtcagtttgctacagggattggaaacaccgatgctggatttgtgttaggcactggcaaaatcctccttaaggttccaccaacaatgaggtttatcttggatggtgaaatgcccagttatctgcaagcaaaggatctgattttacaaatcattggagaaatatctgttgctggtgcaacttacaagacgatggagttcagtggaacaactattgaaagtctgactatggaagaaagaatgacattgtgcaacatggttgtggaagctgggggaaagaatggtgtcatccctcctgatgcgacgacatttaattacgttgagaacaggacatctgtaccctttgagcccgtatatagtgatggaaatgcaagctttattgcagattatcgatttgacgtgtcaaagctggaggctgtggtggctaagcctcattctcctgacaaccgggctctagcaagagaatgcaaagatgtcaaaattgacagagtatacattggttcttgtactggtgggaagactgaggattttatggctgcagctaaacttttccatgcagcaggaaagcaagtcaaagtcccaactttccttgtccccgctactcagaaggtgtggatggatgtgtatgccctccctgtgcctggagcaggtggaaagacgtgtgcgcagatattcgaagaagctggctgcgacacaccaaccagtcctagttgtggtgcctgccttggtggcccagctgacacctatgctcgcttgaatgaacctcaagtgtgtgtctcgacaacgaacagaaactttcctggtcggatgggacacaaagaagggcagatttacttggcttctccttacaccgctgcagcctcggctctgaccggccatgtcaccgacccaagagagttcttgcagtaggatagctttgtccgaaaagaaatctaaatgctgaatcatgagagaagaccgtttaaaatgatgagcattgtgaactatatgtatgtattttccttattgtactgttgaacttcgtagtttctttcaaacactgttaaatttttgatgttttgagtttgaaataataaagagatgagagagacttagatacgtctacactcataataatttgattccaaaaaaaaaaaaaaa

SEQ ID NO: 994 - protein, 505 aa, Brassica napus
MASSVISSSPFLCKSAQQKDLGFPKSSQISVHRCQKRAISRKIVSVMAPQRSSSATGSVKTGMTMTEKILAKAAEKSQVVPGDNIWVNVDVLMTHDVCGPGAFGIFKREFGEKAKVWDSEKIVVIPDHYIFTTDKRANRNVDIMREHCREQNIKYFYDITDLGDFRANPDYKGVCHVALAQEGHCRPGEVLLGTDSHTCTAGAFGQFATGIGNTDAGFVLGTGKILLKVPPTMRFILDGEMPSYLQAKDLILQIIGEISVAGATYKTMEFSGTTIESLTMEERMTLCNMVVEAGGKNGVIPPDATTFNYVENRTSVPFEPVYSDGNASFIADYRFDVSKLEAVVAKPHSPDNRALARECKDVKIDRVYIGSCTGGKTEDFMAAAKLFHAAGKQVKVPTFLVPATQKVWMDVYALPVPGAGGKTCAQIFEEAGCDTPTSPSCGACLGGPADTYARLNEPQVCVSTTNRNFPGRMGHKEGQIYLASPYTAAASALTGHVTDPREFLQ

SEQ ID NO: 995 - DNA, 1503 bp, Glycine max
  CDS (1)..(1503)
atggcttcctctcttctctctccatcatttacatccttcctccgcaccaaggatctctctctctctgctttcacttctcagcgatgcttcaaagcggtgccaaggaaaataatccgttgtgctattgcggcgcctcagcgccaaccttccaccactggatcagtgaggactgcaatgaccatgactgagaagatattggccagagcttctgagaaggcacagctgacccctggggataatgtttgggtcaatgttgatattttgatgacacatgatgtgtgtggccctggttctattgggattttcaagagggagtttggcgaggatgccaaggtttgggaccgtgaaaagcttgtaataatacctgaccactatattttcacaagtgatgaacgtgccaatcgcaatgtagacatattaagagatttctgccatgagcagaatatcaagtacttttatgatattaaggatcttagtaattttaaggtaaatccagactataagggtgtttgccatgttgctcttgctcaggaaggtcattgtaggccaggagaggttctcttaggtactgattctcacacttgtactgctggagcatttggtcaatttgctacagggattggtaatactgatgccggctttgtgctgggaactgggaaacttctgctcaaggtgcccccaactttgagatttgtaatggatggagaaatgcccgattatttgctttctaaggatttgattctgcaaattattggtgaaataactgtggctggggcaacatataaatcgatggagtttgttggtacaaccgttgaaagtttaactatggaagaacggatgacattgtgcaacatggttgttgaagctggtggaaagaatggtgttgttcctgctgacagcactacatttaaatatcttgagggcaagacatctctgccatatgaacctgtttatagtgacgatcaagcaagatttctcgcagagtatagatttgatgtctcaaaattggagccagtggtggccaagcctcattctccggataatcgtgctttggcaagagagtgcaaggatgtgaaaattgacagagtatacataggatcttgtacaggtggcaaaacagaggatttcatggctgcagcaaaagtttttctggcatcaggtaaacaggtcaaagttcctacatttcttgtgcctgcaacacaaaaggtttggatggacttgtactccctccctgtccctggatctggtggtaagacatgctcacagatatttgaagaagttgggtgtgacacaccagctagtcctagttgtggtgcttgtttgggtggcccaaaagatacttacgcacgcatgaatgaacctaaggtttgtgtttcaactacgaacaggaacttcccgggccgaatgggacacaaggaaggtcaaatctatttggcttccccttatacagctgctgcatctgcattgaccggttatgttactgatcctagagagttcttgtag

SEQ ID NO: 996 - protein, 500 aa, Glycine max; identical to SEQ ID NO: 942

SEQ ID NO: 997 - DNA, 1506 bp, Glycine max
  CDS (1)..(1506)
atggcttcctctcttctctctccatcattcacttccttcccccgcataaagaaggatgtctctctctctgctttcacttctcagcgatgcttcaaagcgcttccaaggagaataatccgttgtgctgtggcggcgcctcagcgccaaccttccaccactggatcagtgaggactgcaatgaccatgactgacaagatactggccagagcttctgagaaggtacagctgacccctggcgataatgtttgggtcaatgttgatattttgatgacacatgatgtgtgtggccctggttctattgggattttcaagagggagtgtggtgacgatgccaaggtttgggaccgtgaaaagcttgtaataatacccgaccattatatattcacaagtgatgaacgtgccaatcgcaatgtagacatattaagagatttctgccatgagcagaatatcaagtacttttatgatattaaggatctcagtaattttaaggtaaatccagactataagggtgtttgccatgttgcccttgctcaggaaggtcattgtaggcctggagaggttctcttaggtactgattctcacacttgtactgctggagcatttggccaatttgctacagggattggtaatactgatgctggctttgtgctgggaactgggaaacttctgcttaaggtgcccccaactttgagatttgtaatggatggagaaatgcccgattatttgctttctaaggatttgattctgcaaattattggtgaaataactgtggctggggcaacatataaatcgatggagtttgtcggtacaactgttgaaagtttaactatggaagaacggatgacattgtgcaacatggttgttgaagctggtggaaagaatggtgttgttcctgctgacagcactacatttaaatatcttgagggcaagacatctctgccatatgaacctgtttatagtgacgatcaagcaagatttctcgcagagtatagatttgatgtctcaaaattggagccagtggtggccaagcctcattctccggataatcgtgctttggcaagggagtgcaaggatgtaaaaattgacagagtatacataggatcttgtacaggtggcaaaacggaggatttcatggctgcagcaaaagtttttctggcatcaggtaaacaggtcaaagttcctacatttcttgtgcctgcaacacaaaaggtttggatggacttatactccctccctgtccctggatctggtggtaagacgtgctcccagatatttgaagaagctgggtgtgacacaccagctagtcctagttgtggtgcttgtttgggtggcccgaaagatacttacgcacgcatgaatgaacctaaggtttgtgtttcaactacgaacaggaacttcccgggccgaatgggacacaaggaaggtcaaatctatttggcttccccatatacagctgctgcatctgcattgaccggttatgttactgatcctagagagttcttgtag

SEQ ID NO: 998 - protein, 501 aa, Glycine max
MASSLLSPSFTSFPRIKKDVSLSAFTSQRCFKALPRRIIRCAVAAPQRQPSTTGSVRTAMTMTDKILARASEKVQLTPGDNVWVNVDILMTHDVCGPGSIGIFKRECGDDAKVWDREKLVIIPDHYIFTSDERANRNVDILRDFCHEQNIKYFYDIKDLSNFKVNPDYKGVCHVALAQEGHCRPGEVLLGTDSHTCTAGAFGQFATGIGNTDAGFVLGTGKLLLKVPPTLRFVMDGEMPDYLLSKDLILQIIGEITVAGATYKSMEFVGTTVESLTMEERMTLCNMVVEAGGKNGVVPADSTTFKYLEGKTSLPYEPVYSDDQARFLAEYRFDVSKLEPVVAKPHSPDNRALARECKDVKIDRVYIGSCTGGKTEDFMAAAKVFLASGKQVKVPTFLVPATQKVWMDLYSLPVPGSGGKTCSQIFEEAGCDTPASPSCGACLGGPKDTYARMNEPKVCVSTTNRNFPGRMGHKEGQIYLASPYTAAASALTGYVTDPREFL

SEQ ID NO: 999 - DNA, 1506 bp, Glycine max
  CDS (1)..(1506)
atggcttcctctcttctctctccatcattcacttccttcccccgcataaagaaggatgtctctctctctgctttcacttctcagcgatgcttcaaagcgcttccaaggagaataatccgttgtgctgtggcggcgcctcagcgccaaccttccaccactggatcagtgaggactgcaatgaccatgactgagaagatactggccagagcttctgagaaggtacagctgacccctggcgataatgtttgggtcaatgttgatattttgatgacacatgatgtgtgtggccctggttctattgggattttcaagagggagtttggtgacgatgccaaggtttgggaccgtgaaaagcttgtaataatacccgaccattatatattcacaagtgatgaacgtgccaatcgcaatgtagacatattaagagatttctgccatgagcagaatatcaagtacttttatgatattaaggatctcagtaattttaaggtaaatccagactataagggtgtttgccatgttgcccttgctcaggaaggtcattgtaggcctggagaggttctcttaggtactgattctcacacttgtactgctggagcatttggccaatttgctacagggattggtaatactgatgccggctttgtgctgggaactgggaaacttctgctcaaggtgcccccaactttgagatttgtaatggatggagaaatgcccgattatttgctttctaaggatttgattctgcaaattattggtgaaataactgtggctggggcaacatataaatcgatggagtttgtcggtacaactgttgaaagtttaactatggaagaacggatgacattgtgcaacatggttgttgaagctggtggaaagaatggtgttgttcctgctgacagcactacatttaaatatcttgagggcaagacatctctgccatatgaacctgtttatagtgacgatcaagcaagatttctcgcagagtatagatttgatgtctcaaaattggagccagtggtggccaagcctcattctccggataatcgtgctttggcaagggagtgcaaggatgtaaaaattgacagagtatacataggatcttgtacaggtggcaaaacggaggatttcatggctgcagcaaaagtttttctggcatcaggtaaacaggtcaaagttcctacatttcttgtgcctgcaacacaaaaggtttggatggacttatactccctccctgtccctggatctggtggtaagacgtgctcccagatatttgaagaagctgggtgtgacacaccagctagtcctagttgtggtgcttgtttgggtggcccgaaagatacttacgcacgcatgaatgaacctaaggtttgtgtttcaactacgaacaggaacttcccgggccgaatgggacacaaggaaggtcaaatctatttggcttccccatatacagctgctgcatctgcattgaccggttatgttactgatcctagagagttcttgtag

SEQ ID NO: 1000 - protein, 501 aa, Glycine max
MASSLLSPSFTSFPRIKKDVSLSAFTSQRCFKALPRRIIRCAVAAPQRQPSTTGSVRTAMTMTEKILARASEKVQLTPGDNVWVNVDILMTHDVCGPGSIGIFKREFGDDAKVWDREKLVIIPDHYIFTSDERANRNVDILRDFCHEQNIKYFYDIKDLSNFKVNPDYKGVCHVALAQEGHCRPGEVLLGTDSHTCTAGAFGQFATGIGNTDAGFVLGTGKLLLKVPPTLRFVMDGEMPDYLLSKDLILQIIGEITVAGATYKSMEFVGTTVESLTMEERMTLCNMVVEAGGKNGVVPADSTTFKYLEGKTSLPYEPVYSDDQARFLAEYRFDVSKLEPVVAKPHSPDNRALARECKDVKIDRVYIGSCTGGKTEDFMAAAKVFLASGKQVKVPTFLVPATQKVWMDLYSLPVPGSGGKTCSQIFEEAGCDTPASPSCGACLGGPKDTYARMNEPKVCVSTTNRNFPGRMGHKEGQIYLASPYTAAASALTGYVTDPREFL

SEQ ID NO: 1001 - DNA, 1509 bp, Glycine max
  CDS (1)..(1509)
atggcttcctctcttctctctccatcattcacttccttcccccgcataaagaaggatgtctctctctctgctttcacttctcagcgatgcttcaaagcgcttccaaggagaataatccgttgtgctgtggcggcgcctcagcgccaaccttccaccactggatcagtgaggactgcaatgaccatgactgagaagatactggccagagcttctgagaaggtacagctgacccctggcgataatgtttgggtcaatgttgatattttgatgacacatgatgtgtgtggccctggttctattgggattttcaagagggagtttggtgacgatgccaaggtttgggaccgtgaaaagcttgtaataatacccgaccattatatattcacaagtgatgaacgtgccaatcgcaatgtagacatattaagagatttctgccatgagcagaatatcaagtacttttatgatattaaggatctcagtaattttaaggtaaatccagactataagggtgtttgccatgttgcccttgctcaggaaggtcattgtaggcctggagaggttctcttaggtactgattctcacacttgtactgctggagcatttggccaatttgctacagggattggtaatactgatgctggctttgtgctgggaactgggaaacttctgcttaaggtgcccccaactttgagatttgtaatggatggagaaatgcctgattatttgctttctaaggatttgattctgcaaattattggtgaaataactgtggctggtgcaacatataaatcgatggagtttgtcggtacaactgttgaaagtttaactatggaagaacggatgacattgtgcaacatggttgttgaagctggtggaaagaatggtgttgttcctgctgacagcactacatttaaatatcttgagggcaagacatctctgccatatgaacctgtttatagtgacgatcaagcaagatttcttgctgagtatagatttgatgtctcaaaattggagccagtggtggccaagcctcattctccagataatcgtgctttggcaagggagtgcaaggatgtaaaaattgacagagtatacataggatcttgtacaggtggcaaaacggaggatttcatggctgctgcaaaagtttttctggcatcaggtaaacaggtcaaagttcctacatttcttgtgcctgcaacacaaaaggtttggatggacttatactcccttccagtccctggatctggtggtaagacgtgctcccagatatttgaagaagctgggtgtgacacaccagctagtcctagttgcggtgcttgtttgggtggcccgaaagatacttacgcacgcatgaatgaacctaaggtttgtgtttcaactacgaacaggaacttcccgggccgaatgggacacaaggaaggtcaaatctatttggcttccccatatacagctgctgcatctgcattgaccggttatgttactgatcctaaagagttcttgcagtag

SEQ ID NO: 1002 - protein, 502 aa, Glycine max; identical to SEQ ID NO: 930

SEQ ID NO: 1003 - DNA, 1518 bp, Zea mays
  CDS (1)..(1518)
atggcttcctccatctccgccgccgctaaggcctccgcggcctttgcccaaaagaaggagctggccgcgccggcgccgcaccgcgcgggctcgagccgtcggaccaagccgtgccgcgtgcgcgccgtcgcgtcgcccgcgcgcaccccccgcgccccgtcgtccaccggctcggtgaagaccgcgatgacgatgacggagaagatcctggcgagggcgtcggagcgcgcggcgctggagcccggggagaacgtgtgggtggacatcgacgtgctcatgacgcacgacgtctgcgggcccggcaccatcggcatcttcaagaaggagttcggggaggatgccaaggtctgggaccgcgagaaggtcgtcatcatccccgaccactacatcttcaccagcgacgagcgcgccaaccgcaacgtcgatatcctcagggacttctgtctggagcagaacatcaagtacttctatgatatcaaggacctcagcgatttcagggctaatccagactacaagggtgtctgccacattgcacttgctcaggaaggccactgccgaccaggcgaggttctcctgggtactgattctcatacgtgcaatgctggagcctttggtcaatttgcaaccggaattggaaacactgatgcaggttttgtgatgggcactggaaaggctcttctcaaggtgccacctactatcaggtttgtattagatggagaaatgccgccttatttacttgcgaaggatctgattttgcaaattattggtgagatttcagtatctggtgcaacctacaaatcgatggagtttgttggatcaactgtagaaagtctaaccatggaagaacgtatgacactatgcaacatggttgttgaagctggtggaaagaacggtgtcgtgcctgctgatgaaactacatttaaataccttgagggtaggacatcagttgattatcaacctgtctacagtgatgctgaggccagattttttagtgactaccggtttgatgtatcgaaactggagccagtagttgccaagccacattcgcctgacaaccgtgccctagcaagagaatgcaaagatgtcaagatcgaccgagtctatattggttcctgcactggtggcaagactgaggacttccttgctgccgcaaaggtgttcttagcctcgggaaagaaggttaaagttcccacattccttgtccctgccacacaaaaggtgtggatggacgtatatagccttcctgtaccaggatctggcggcaaaacttgcgcccagatattcgaggaggctggttgtgatacaccagcaagtcctaattgcggcgcttgtctgggtggccctcgcgatacgtatgcacggatgaatgaacctacggtctgcgtgtccaccacgaacaggaacttcccgggcaggatggggcacaaggaagggcagatctacctggcgtccccctacaccgctgcagcctcggccctgacggggtacgtcacggaccccagggacttcctcatgtga

SEQ ID NO: 1004 - protein, 505 aa, Zea mays; identical to SEQ ID NO: 936

SEQ ID NO: 1005 - DNA, 1515 bp, Zea mays
  CDS (1)..(1515)
atggcctcctccgtctccgccgccgccaaggccgccgcggcgttcgcgcacaaggtccagaaggagctggccgcgccggcgcagcgccgcgcgggcttgacccgccggaccaagccgtgcagcgtgcgcgccgtcgcttcgcccgcgcgcgccctgtcgtccaccggctcggtgaagagcgcgatgacgatgacggagaagatactggcgcgggcgtcggagcgcgcggcgctggagcccggggagaacgtgtgggtcgacgtcgacgtgctcatgacgcacgacgtctgcgggcccggcgccttcgacatcttcaagaaggagttcggggaggacgccagggtctgggaccgcgagaagctcgtcgtcatcccggaccactacatcttcaccagcgacggccgtgccaaacgcaacgtcgacatcctcagggacttctgtgcggagcagaacatcaagtacttctatgacatcaaggacctcagcgatttcagggctaatccggactacaaaggcgtctgccacatcgcacttgctcaggaagcccactgccgaccaggcgaggttctcttgggcactgattctcatacatgcaatgctggagcttttggtcagtttgcaactggaatcggaaacactgatgcaggttttgtgttgggcactggaaaggctcttctcaaggtgccacctactatcaggtttatattagatggagagatgccgccttatttacttgcgaaggatctgattttgcaaattattggagagatttcagtatctggtgcgacctacaaatcaatggagtttgttggatcaactgtagaaagtctaaccatggaagagcgtatgacactatgcaacatggttattgaagctggtggaaagaacggtgttgtgcctgctgatgaaactacatttaaataccttgagggtaagacatcagtcgattatgaacctgtctacagtgatgctcaagccagattttttagcgactaccggtttgatgtatcaaaactggagccagtagttgccaagccacattcgcctgacaaccgtgctccagcacgagaatgcaaagatgtgaagatcgaccgagtctatattggttcttgcactggtggtaagaccgaggatttccttgctgctgcaaaggtgttcttagcctcgggaaagaaggttaaagttcccacatttcttgtccctgccacacaaaaggtgtggttggacatatatagcctccctgtaccaggatctggtggcaaaacttgctcccagatatttgaggaggctggttgtgacacaccagcaagtcctaattgtggtgcttgtttgggtggccctcgtgatacatatgcacggatgaatgaacctactgtctgcgtgtccaccacgaacaggaactttccgggcaggatggggcacaaggaagggcaaatctacctggcgtctccctacactgcggctgcctcagccctgacggggtatgttacggaccccagggacttcctcatgtaa

SEQ ID NO: 1006 - protein, 504 aa, Zea mays; identical to SEQ ID NO: 934

SEQ ID NO: 1007 - DNA, 30 bp, Artificial sequence
  primer
atagagctcgagtgatttggggatttcttc

SEQ ID NO: 1008 - DNA, 33 bp, Artificial sequence
  primer
atacccgggttttcaccaaactctctcttgaag

SEQ ID NO: 1009 - DNA, 23 bp, Artificial sequence
  primer
atggcttctgttatctcttcctc

SEQ ID NO: 1010 - DNA, 21 bp, Artificial sequence
  primer
ctactgcaagaactcccttgg

SEQ ID NO: 1011 - DNA, 30 bp, Artificial sequence
  primer
ataccatgggagtgatttggggatttcttc

SEQ ID NO: 1012 - DNA, 35 bp, Artificial sequence
  primer
atattaattaattttcaccaaactctctcttgaag

SEQ ID NO: 1013 - DNA, 30 bp, Artificial sequence
  primer
ataggtaccgagtgatttggggatttcttc

SEQ ID NO: 1014 - DNA, 33 bp, Artificial sequence
  primer
atagtcgacttttcaccaaactctctcttgaag

SEQ ID NO: 1015 - protein, 488 aa, Artificial sequence
  consensus sequence
  Variant (3)..(4): Xaa in position 3 to 4 is any amino acid
  Variant (10)..(10): Xaa in position 10 is any amino acid
  Variant (12)..(16): Xaa in position 12 to 16 is any amino acid
  Variant (17)..(18): Xaa in position 17 to 18 is any or no amino acid
  Variant (21)..(27): Xaa in position 21 to 27 is any amino acid
  Variant (29)..(30): Xaa in position 29 to 30 is any amino acid
  Variant (32)..(32): Xaa in position 32 is any amino acid
  Variant (35)..(36): Xaa in position 35 to 36 is any amino acid
  Variant (39)..(43): Xaa in position 39 to 43 is any amino acid
  Variant (45)..(51): Xaa in position 45 to 51 is any amino acid
  Variant (52)..(55): Xaa in position 52 to 55 is any or no amino acid
  Variant (59)..(60): Xaa in position 59 to 60 is any amino acid
  Variant (62)..(62): Xaa in position 62 is any amino acid
  Variant (64)..(66): Xaa in position 64 to 66 is any amino acid
  Variant (69)..(76): Xaa in position 69 to 76 is any amino acid
  Variant (78)..(84): Xaa in position 78 to 84 is any amino acid
  Variant (86)..(86): Xaa in position 86 is any amino acid
  Variant (88)..(89): Xaa in position 88 to 89 is any amino acid
  Variant (92)..(92): Xaa in position 92 is any amino acid
  Variant (94)..(94): Xaa in position 94 is any amino acid
  Variant (95)..(95): Xaa in position 95 is any or no amino acid
  Variant (98)..(101): Xaa in position 98 to 101 is any amino acid
  Variant (102)..(112): Xaa in position 102 to 112 is any or no amino acid
  Variant (117)..(118): Xaa in position 117 to 118 is any amino acid
  Variant (120)..(122): Xaa in position 120 to 122 is any amino acid
  Variant (124)..(126): Xaa in position 124 to 126 is any amino acid
  Variant (129)..(132): Xaa in position 129 to 132 is any amino acid
  Variant (134)..(134): Xaa in position 134 is any amino acid
  Variant (140)..(141): Xaa in position 140 to 141 is any amino acid
  Variant (144)..(144): Xaa in position 144 is any amino acid
  Variant (146)..(146): Xaa in position 146 is any amino acid
  Variant (153)..(153): Xaa in position 153 is any amino acid
  Variant (156)..(161): Xaa in position 156 to 161 is any amino acid
  Variant (165)..(168): Xaa in position 165 to 168 is any amino acid
  Variant (171)..(171): Xaa in position 171 is any amino acid
  Variant (173)..(174): Xaa in position 173 to 174 is any amino acid
  Variant (176)..(178): Xaa in position 176 to 178 is any amino acid
  Variant (180)..(187): Xaa in position 180 to 187 is any amino acid
  Variant (188)..(188): Xaa in position 188 is any or no amino acid
  Variant (194)..(195): Xaa in position 194 to 195 is any amino acid
  Variant (198)..(200): Xaa in position 198 to 200 is any amino acid
  Variant (202)..(202): Xaa in position 202 is any amino acid
  Variant (205)..(205): Xaa in position 205 is any amino acid
  Variant (207)..(209): Xaa in position 207 to 209 is any amino acid
  Variant (212)..(212): Xaa in position 212 is any amino acid
  Variant (214)..(218): Xaa in position 214 to 218 is any amino acid
  Variant (220)..(223): Xaa in position 220 to 223 is any amino acid
  Variant (227)..(228): Xaa in position 227 to 228 is any amino acid
  Variant (231)..(232): Xaa in position 231 to 232 is any amino acid
  Variant (234)..(234): Xaa in position 234 is any amino acid
  Variant (238)..(238): Xaa in position 238 is any amino acid
  Variant (240)..(243): Xaa in position 240 to 243 is any amino acid
  Variant (245)..(246): Xaa in position 245 to 246 is any amino acid
  Variant (248)..(249): Xaa in position 248 to 249 is any amino acid
  Variant (251)..(263): Xaa in position 251 to 263 is any amino acid
  Variant (264)..(274): Xaa in position 264 to 274 is any or no amino acid
  Variant (277)..(278): Xaa in position 277 to 278 is any amino acid
  Variant (280)..(287): Xaa in position 280 to 287 is any amino acid
  Variant (290)..(292): Xaa in position 290 to 292 is any amino acid
  Variant (295)..(295): Xaa in position 295 is any amino acid
  Variant (298)..(298): Xaa in position 298 is any amino acid
  Variant (301)..(301): Xaa in position 301 is any amino acid
  Variant (305)..(309): Xaa in position 305 to 309 is any amino acid
  Variant (311)..(315): Xaa in position 311 to 315 is any amino acid
  Variant (316)..(346): Xaa in position 316 to 346 is any or no amino acid
  Variant (349)..(349): Xaa in position 349 is any amino acid
  Variant (351)..(351): Xaa in position 351 is any amino acid
  Variant (357)..(357): Xaa in position 357 is any amino acid
  Variant (359)..(360): Xaa in position 359 to 360 is any amino acid
  Variant (363)..(365): Xaa in position 363 to 365 is any amino acid
  Variant (368)..(376): Xaa in position 368 to 376 is any amino acid
  Variant (377)..(383): Xaa in position 377 to 383 is any or no amino acid
  Variant (385)..(389): Xaa in position 385 to 389 is any amino acid
  Variant (392)..(407): Xaa in position 392 to 407 is any amino acid
  Variant (408)..(415): Xaa in position 408 to 415 is any or no amino acid
  Variant (417)..(418): Xaa in position 417 to 418 is any amino acid
  Variant (421)..(425): Xaa in position 421 to 425 is any amino acid
  Variant (426)..(426): Xaa in position 426 is any or no amino acid
  Variant (428)..(428): Xaa in position 428 is any amino acid
  Variant (431)..(431): Xaa in position 431 is any amino acid
  Variant (436)..(447): Xaa in position 436 to 447 is any amino acid
  Variant (448)..(450): Xaa in position 448 to 450 is any or no amino acid
  Variant (453)..(453): Xaa in position 453 is any amino acid
  Variant (458)..(458): Xaa in position 458 is any amino acid
  Variant (463)..(467): Xaa in position 463 to 467 is any amino acid
  Variant (468)..(468): Xaa in position 468 is any or no amino acid
  Variant (474)..(474): Xaa in position 474 is any amino acid
  Variant (481)..(482): Xaa in position 481 to 482 is any amino acid
  Variant (484)..(486): Xaa in position 484 to 486 is any amino acid
MTXXEKILAXAXXXXXXXPGXXXXXXXDXXMXHDXXGPXXXXXFXXXXXXXXXXXVWDXXKXVXXXDHXXXXXXXXAXXXXXXXRXFXXEQXIXXFYXXXXXXXXXXXXXXXGVCHXXLXXXGXXXPGXXXXGXDSHTCXXGAXGXFATGIGXTDXXXXXXTGKXXXXVPXTXXFXXXGXXXXXXXXXKDLILXXIGXXXVXGAXYXXXEFXGXXXXXLXXXXRMTXXNMXXEXGGKXGXXXXDXXTXXYXXXXXXXXXXXXXXXXXXXXXXXXSDXXAXXXXXXXXDVXXXEPXVAXPHXPDNXXXXXEXXXXXXXXXXXXXXXXXXXXXXXXXXXXXXXXXXXXIDXVXIGSCTXGXXEDXXXAAXXXXXXXXXXXXXXXXVXXXXXPAXXXXXXXXXXXXXXXXXXXXXXXXFXXAGXXXXXXPXCGXCLGGXXXXXXXXXXXXXXXSTXNRNFXGRMGXXXXXXYLASPXTAAASAXXGXXXDP

SEQ ID NO: 1016 - protein, 61 aa, Artificial sequence
  protein pattern
  Variant (3)..(3): Xaa in position 3 is any amino acid
  Variant (5)..(5): Xaa in position 5 is any amino acid
  Variant (6)..(6): Xaa in position 6 is Ala, Ile, Leu or Val
  Variant (8)..(8): Xaa in position 8 is any amino acid
  Variant (9)..(9): Xaa in position 9 is any or no amino acid
  Variant (11)..(11): Xaa in position 11 is any or no amino acid
  Variant (13)..(15): Xaa in position 13 to 15 is any amino acid
  Variant (18)..(18): Xaa in position 18 is Asp, Glu or Thr
  Variant (19)..(20): Xaa in position 19 to 20 is Ile, Leu or Val
  Variant (21)..(21): Xaa in position 21 is Phe, Ile, Leu or Val
  Variant (23)..(23): Xaa in position 23 is Ala, Ser or Thr
  Variant (29)..(29): Xaa in position 29 is Ala, Asn or Thr
  Variant (30)..(30): Xaa in position 30 is any amino acid
  Variant (32)..(32): Xaa in position 32 is Ala or Ser
  Variant (33)..(33): Xaa in position 33 is Phe or Leu
  Variant (35)..(35): Xaa in position 35 is any amino acid
  Variant (37)..(37): Xaa in position 37 is Ala, Gly, Ser or Thr
  Variant (38)..(38): Xaa in position 38 is Ser or Thr
  Variant (40)..(40): Xaa in position 40 is Ile, Met or Val
  Variant (42)..(42): Xaa in position 42 is Asn or Ser
  Variant (45)..(45): Xaa in position 45 is any amino acid
  Variant (46)..(46): Xaa in position 46 is Ala or Gly
  Variant (47)..(47): Xaa in position 47 is any amino acid
  Variant (48)..(48): Xaa in position 48 is Ala, Gly, Ile or Val
  Variant (49)..(49): Xaa in position 49 is any amino acid
  Variant (50)..(50): Xaa in position 50 is Ala or Gly
  Variant (53)..(53): Xaa in position 53 is Glu or Lys
  Variant (54)..(54): Xaa in position 54 is Ala, Ile, Leu or Val
  Variant (55)..(57): Xaa in position 55 to 57 is any amino acid
  Variant (60)..(60): Xaa in position 60 is any amino acid
  Variant (61)..(61): Xaa in position 61 is Ala, Ser or Thr
GVXHXXLXXEXGXXXPGXXXXGXDSHTCXXGXXGXFXXGXGXTDXXXXXXTGXXXXXVPXX

SEQ ID NO: 1017 - protein, 59 aa, Artificial sequence
  protein pattern
  Variant (4)..(4): Xaa in position 4 is any amino acid
  Variant (6)..(7): Xaa in position 6 to 7 is any amino acid
  Variant (8)..(8): Xaa in position 8 is Ile or Leu
  Variant (10)..(11): Xaa in position 10 to 11 is any amino acid
  Variant (12)..(12): Xaa in position 12 is Gly, Ser or Thr
  Variant (13)..(13): Xaa in position 13 is any amino acid
  Variant (14)..(14): Xaa in position 14 is Ala, Asp, Glu, Asn or Ser
  Variant (17)..(17): Xaa in position 17 is any amino acid
  Variant (19)..(19): Xaa in position 19 is any amino acid
  Variant (20)..(20): Xaa in position 20 is Ala, Ser, Thr or Val
  Variant (21)..(22): Xaa in position 21 to 22 is any amino acid
  Variant (23)..(23): Xaa in position 23 is Phe or Tyr
  Variant (24)..(24): Xaa in position 24 is any amino acid
  Variant (26)..(26): Xaa in position 26 is Glu, Gln, Ser or Thr
  Variant (27)..(27): Xaa in position 27 is Ala, Thr or Val
  Variant (28)..(28): Xaa in position 28 is Ile or Val
  Variant (29)..(30): Xaa in position 29 to 30 is any amino acid
  Variant (31)..(31): Xaa in position 31 is Leu or Met
  Variant (32)..(32): Xaa in position 32 is Asn, Pro, Ser or Thr
  Variant (33)..(33): Xaa in position 33 is Ile, Met or Val
  Variant (34)..(34): Xaa in position 34 is any amino acid
  Variant (35)..(35): Xaa in position 35 is Glu, Gly, Asn or Gln
  Variant (37)..(37): Xaa in position 37 is Phe or Met
  Variant (39)..(39): Xaa in position 39 is Ile, Leu or Met
  Variant (40)..(40): Xaa in position 40 is Ala, Cys, Ser or Thr
  Variant (43)..(43): Xaa in position 43 is Ala or Val
  Variant (44)..(44): Xaa in position 44 is Ile or Val
  Variant (46)..(46): Xaa in position 46 is any amino acid
  Variant (48)..(48): Xaa in position 48 is Ala or Gly
  Variant (49)..(49): Xaa in position 49 is any amino acid
  Variant (50)..(50): Xaa in position 50 is Ala, Asn, Ser or Thr
  Variant (52)..(52): Xaa in position 52 is Ile, Leu or Val
  Variant (53)..(53): Xaa in position 53 is Phe, Ile or Val
  Variant (54)..(54): Xaa in position 54 is any amino acid
  Variant (55)..(55): Xaa in position 55 is Ala, Pro or Val
  Variant (57)..(58): Xaa in position 57 to 58 is any amino acid
KDLXLXXXGXXXXXGAXYXXXXXXGXXXXXXXXXXRXTXXNMXXEXGXXXGXXXXDXXT

SEQ ID NO: 1018 - protein, 21 aa, Artificial sequence
  protein pattern
  Variant (4)..(4): Xaa in position 4 is Gly or Ser
  Variant (6)..(6): Xaa in position 6 is any amino acid
  Variant (7)..(7): Xaa in position 7 is Thr or Val
  Variant (11)..(11): Xaa in position 11 is Cys or Ser
  Variant (13)..(13): Xaa in position 13 is Ile, Leu or Val
  Variant (14)..(14): Xaa in position 14 is any amino acid
  Variant (16)..(16): Xaa in position 16 is any amino acid
  Variant (17)..(17): Xaa in position 17 is Ile, Leu or Val
  Variant (18)..(18): Xaa in position 18 is Ala, Gly, Thr or Val
  Variant (19)..(19): Xaa in position 19 is any amino acid
  Variant (21)..(21): Xaa in position 21 is Asp, Glu, Lys or Arg
YLAXPXXAAAXAXXGXXXXPX

SEQ ID NO: 1019 - protein, 19 aa, Artificial sequence
  protein pattern
  Variant (2)..(6): Xaa in position 2 to 6 is any amino acid
  Variant (7)..(8): Xaa in position 7 to 8 is any or no amino acid
  Variant (10)..(10): Xaa in position 10 is any or no amino acid
  Variant (15)..(15): Xaa in position 15 is any amino acid
EXXXXXXXTXNRNFXGRMG

SEQ ID NO: 1020 - protein, 21 aa, Artificial sequence
  protein pattern
  Variant (3)..(3): Xaa in position 3 is any amino acid
  Variant (4)..(4): Xaa in position 4 is Ala or Val
  Variant (5)..(5): Xaa in position 5 is any amino acid
  Variant (6)..(6): Xaa in position 6 is Ile or Leu
  Variant (8)..(8): Xaa in position 8 is Ser or Thr
  Variant (11)..(11): Xaa in position 11 is Gly or Asn
  Variant (12)..(12): Xaa in position 12 is Gly or Ser
  Variant (13)..(13): Xaa in position 13 is Lys or Arg
  Variant (14)..(14): Xaa in position 14 is any amino acid
  Variant (15)..(15): Xaa in position 15 is Glu or Ser
  Variant (17)..(18): Xaa in position 17 to 18 is any amino acid
  Variant (19)..(19): Xaa in position 19 is any or no amino acid
  Variant (21)..(21): Xaa in position 21 is Ala or Ile
IDXXXXGXCTXXXXXDXXXAX

SEQ ID NO: 1021 - protein, 17 aa, Artificial sequence
  protein pattern
  Variant (2)..(2): Xaa in position 2 is Glu, Ser or Thr
  Variant (3)..(4): Xaa in position 3 to 4 is any amino acid
  Variant (7)..(7): Xaa in position 7 is any or no amino acid
  Variant (9)..(9): Xaa in position 9 is any or no amino acid
  Variant (11)..(11): Xaa in position 11 is any amino acid
  Variant (13)..(13): Xaa in position 13 is Phe or His
  Variant (14)..(14): Xaa in position 14 is any amino acid
  Variant (15)..(15): Xaa in position 15 is Pro or Val
  Variant (16)..(16): Xaa in position 16 is Asp or Glu
VXXXEPXVXAXPXXXXN

SEQ ID NO: 1022 - protein, 19 aa, Artificial sequence
  protein pattern
  Variant (4)..(4): Xaa in position 4 is any amino acid
  Variant (5)..(5): Xaa in position 5 is Glu, Ser or Thr
  Variant (6)..(6): Xaa in position 6 is Lys or Arg
  Variant (7)..(7): Xaa in position 7 is Ile, Leu or Val
  Variant (9)..(9): Xaa in position 9 is Ile, Leu or Val
  Variant (10)..(10): Xaa in position 10 is Ile, Leu, Pro or Val
  Variant (11)..(11): Xaa in position 11 is any amino acid
  Variant (14)..(14): Xaa in position 14 is any amino acid
  Variant (15)..(15): Xaa in position 15 is Ala, Ile or Val
  Variant (16)..(16): Xaa in position 16 is any amino acid
  Variant (17)..(17): Xaa in position 17 is Ala or Thr
  Variant (18)..(18): Xaa in position 18 is Ala, Asp, Glu, Asn, Ser or Thr
  Variant (19)..(19): Xaa in position 19 is Asp, Asn or Ser
VWDXXXXVXXXDHXXXXXX

SEQ ID NO: 1023 - protein, 27 aa, Artificial sequence
  protein pattern
  Variant (2)..(2): Xaa in position 2 is Gly or Asn
  Variant (3)..(3): Xaa in position 3 is Asp, Glu or Gln
  Variant (4)..(4): Xaa in position 4 is any amino acid
  Variant (5)..(5): Xaa in position 5 is Ile, Pro or Val
  Variant (6)..(8): Xaa in position 6 to 8 is any amino acid
  Variant (9)..(9): Xaa in position 9 is Ile, Leu or Val
  Variant (10)..(10): Xaa in position 10 is Asp or Glu
  Variant (11)..(12): Xaa in position 11 to 12 is any amino acid
  Variant (13)..(13): Xaa in position 13 is Phe, Leu or Met
  Variant (14)..(14): Xaa in position 14 is Ala, Gly, Thr or Val
  Variant (15)..(15): Xaa in position 15 is any amino acid
  Variant (16)..(16): Xaa in position 16 is Asp or Glu
  Variant (17)..(17): Xaa in position 17 is Ile or Val
  Variant (18)..(18): Xaa in position 18 is Cys or Thr
  Variant (19)..(19): Xaa in position 19 is any amino acid
  Variant (21)..(21): Xaa in position 21 is any amino acid
  Variant (22)..(22): Xaa in position 22 is Ala, Ser or Thr
  Variant (23)..(23): Xaa in position 23 is Phe, Ile or Val
  Variant (24)..(25): Xaa in position 24 to 25 is any amino acid
  Variant (26)..(26): Xaa in position 26 is Phe or Leu
  Variant (27)..(27): Xaa in position 27 is Glu, Lys or Arg
PXXXXXXXXXXXXXXXXXXPXXXXXXX

SEQ ID NO: 1024 - protein, 9 aa, Artificial sequence
  protein pattern
  Variant (2)..(2): Xaa in position 2 is Cys, Gly, Asn, Ser or Thr
  Variant (5)..(5): Xaa in position 5 is Ala or Pro
  Variant (7)..(7): Xaa in position 7 is Leu or Met
  Variant (9)..(9): Xaa in position 9 is Ala or Gly
PXCGXCXGX

SEQ ID NO: 1025 - DNA, 1929 bp, Arabidopsis thaliana
  CDS (1)..(1929)
atgccgctcggagagagaggaggatgggagaggaccgagtccagatactgcggcgttgagactgatttctccaacgatgttactcatcttctcaacttcaacatttccaccggcggttttgactatgttctcgctcctctggtggatccttcgtataggccgagcttggtggaaggaaatggtgtagatactcaggttcttccagtctgtggctctgacttagtcttgtcaccttctcaatggagcagtcatgttgttggaaaaattagttcgtggattgacttggattctgaagatgaggtcttacggatggattcagaaaccacattgaagcaagaaatagcttgggctactcatctctccttacaggcatgccttcttcccactcctaaagggaaatcgtgcgccaattatgccagatgtgtgaaccagatcttacaaggcctcactaccttgcagttatggctaagggttccactggtgaagtctgaaggtgattcaatggatgatacctcagagggactgaatgattcctgggagctgtggaattcgtttcgtcttctttgtgagcatgacagtaagctgtctgttgctcttgatgttctgagtacactaccctctgaaacttcactagggcgctggatgggagagtctgtgagagcagccatattaagcactgatgctttcttaacaaatgctcggggttatccttgcttgtccaaacgccaccaaaagttaatagcaggattttttgatcatgctgcccaggttgtaatttgtggaaagcctgttcataatcttcaaaagcctcttgattctagctcggagggtacagagaagaatcctctgcgcatatatttggactatgttgcttatctgttccaaaagatggaatcactttctgaacaggaacgcatcgagctgggttacagggattttttgcaggcacccctgcagcctcttatggacaacctcgaagcccaaacctatgagacgtttgagagagactctgttaaatacatccaatatcaaagagcagttgagaaagccttggtggacagggtacctgatgaaaaagcatccgagttgactactgtcctgatggttgtgggggcaggaaggggaccccttgtgagggcatcgttacaggcagctgaagaaactgatcggaagttgaaagtttatgccgtggaaaagaatcctaatgccgttgtaacactccataatttggttaagatggaaggatgggaagacgttgttacgataatatcctgtgacatgcgtttttggaatgctcccgagcaagctgatatattggttagcgaactgctgggttcttttggagacaatgaactttctcctgagtgtcttgatggagcccaaaggtttctgaagccagacggaatttcaataccatcctcgtatacaagtttcatacagcctataacagcttcgaagctttacaatgacgttaaggctcataaagatcttgcgcactttgaaactgcttatgttgtcaagctgcatagtgtagcaaagcttgctccttcccagtctgttttcacatttactcatccaaacttctcaacgaaagtcaacaaccaacgctataagaagcttcagttcagtctaccaagcgatgctggctcagctttggtgcatggattcgctggctattttgattccgtcctttataaagatgttcatcttgggatcgagcctacaacagcaacaccaaacatgttcagctggttcccaatctttttcccattgaggaagcctgtggaggttcaccctgatactccattagaagtacacttttggaggtgttgtggttcctcaaaggtttggtatgaatggtcggtgtcttcacctactccatctccgatgcataacaccaatggccgttcgtactgggttggcctttag

SEQ ID NO: 1026 - protein, 642 aa, Arabidopsis thaliana
MPLGERGGWERTESRYCGVETDFSNDVTHLLNFNISTGGFDYVLAPLVDPSYRPSLVEGNGVDTQVLPVCGSDLVLSPSQWSSHVVGKISSWIDLDSEDEVLRMDSETTLKQEIAWATHLSLQACLLPTPKGKSCANYARCVNQILQGLTTLQLWLRVPLVKSEGDSMDDTSEGLNDSWELWNSFRLLCEHDSKLSVALDVLSTLPSETSLGRWMGESVRAAILSTDAFLTNARGYPCLSKRHQKLIAGFFDHAAQVVICGKPVHNLQKPLDSSSEGTEKNPLRIYLDYVAYLFQKMESLSEQERIELGYRDFLQAPLQPLMDNLEAQTYETFERDSVKYIQYQRAVEKALVDRVPDEKASELTTVLMVVGAGRGPLVRASLQAAEETDRKLKVYAVEKNPNAVVTLHNLVKMEGWEDVVTIISCDMRFWNAPEQADILVSELLGSFGDNELSPECLDGAQRFLKPDGISIPSSYTSFIQPITASKLYNDVKAHKDLAHFETAYVVKLHSVAKLAPSQSVFTFTHPNFSTKVNNQRYKKLQFSLPSDAGSALVHGFAGYFDSVLYKDVHLGIEPTTATPNMFSWFPIFFPLRKPVEVHPDTPLEVHFWRCCGSSKVWYEWSVSSPTPSPMHNTNGRSYWVGL

SEQ ID NO: 1027 - DNA, 2204 bp, Triticum aestivum
  CDS (84)..(2018)
cctaaaccctagcccgactaaccccctccccctcctcctccggcggcggcgccagccaccggcagcacacaaaccgggcgaagatgccgctggggcagcgcgccggggacaagagcgactcccgctactgcggggtcgaggtgctcgacttccccgccggcgacggcctccccgccgtcctcacccactccctctcctccgccttcgacttcctcctcgccccgctcgtcgatcccgactaccggcccacgcccggcgccgtcctgccggtggcggcctcggacctcgtcctcagcccgtcccagtggagcagccacatcgtcgggaagatcagcgagtggattgatttggattccgaggacgagcagctccggctcgactcggagctcacgcttaagcaggagatcgcctgggcgactcatctctccttgcaggcgtgcgttattcctcctcccaagagatcaacctgtgccaattatgctagagttgtaaataatattttgcaaggcctgaccaatatgcagttgtggcttaggatacctctggagaagtctgaatctatggaagaagaccgtgacaaaagtgaaacggtagactcgtgggaatggtggaattcattcagactgttatgcgagcatagcagtcaactgtatgtagcacttgatatcttgagctcgctgccatcaatgaactctctagggcgctggtttggggagcctgtaagagctgcgattcttcaaacagatgcttttctaacaaatgcaagaggttatccttgcttgtccaaacgccaccagactctgcttactggtttttttaaccattcagttcaggtaattatctctgggagatcaaatcataatgtttcccaagtatctgaaggagtgctctcacgtgatgaaaaccacaccgaagatacccccactcagcatgcattgagcccgtaccttgactacatggcctacctctatcagaggatggatccacttcctgagcaagaacgctttgagatcaactatagggatttcttgcaatctcctctccagcctctgatggataatttggaagctcagacgtatgagactttcgagaaagacactgtgaagtatacacagtatcaaagagcaatcgctaaggcgttggttgataaggtctcagatgatgaagtttccacagctaggacggtcttgatggttgttggagcaggccgagggcctctcgtaagagcatcattgcaggctgcagaagaaactggtcggacgctaaaagtatatgcagtggagaaaaatcctaacgcagttattactcttcatagtttgatcaaattggaagggtgggaaagcatggttactattatttctagtgacatgcggtgctgggatgctcctgaaaaagctgatattttggtcagcgagttgcttgggtcctttggtgataatgagttatctcctgagtgtctagatggtgcccaaagattcttgaagcctgatgggatttctattccttcatcttacacaagctttatccaaccagtaactgcatcgaaactacacaatgatattaaagcacacaaagatattgcacattttgaaacggcatatgttgtcaagctacaccgagtagcaagacttgcacctccacaagaggttttctctttcgcacatccaaacttctcaccaaaggccaccaaccaaaggtataccaagttacagtttgaactaccacaagacacgggatcatgccttgtgcacggattcgctggatattttgatgccgtactatataaagatgtccatctaggaattgagccgaacacatgtacaccaaacatgtttagctggttcccaatctttttcccactgaggaagcccatatacgtgccgtcagagtcgcccatagaagtgcacttttggcgatgctgtggtgccaccaaggtgtggtacgagtgggctctggtggctccgtctccatccccgatccataacagcaatggccggtcatattgggtcggtctataagttggaaaatcagaatactctgtgtcggttttttgagagagaagaaattgtcgatcatatgcttggttttttagtgtgtccagctacctgggtcaaagaaacagatcttagaacctggatacaggcacatgctgtaactcgcaagcttttgctttgtaacatcttttacttaaaaaaaaaaaaaaa

SEQ ID NO: 1028 - protein, 644 aa, Triticum aestivum
MPLGQRAGDKSDSRYCGVEVLDFPAGDGLPAVLTHSLSSAFDFLLAPLVDPDYRPTPGAVLPVAASDLVLSPSQWSSHIVGKISEWIDLDSEDEQLRLDSELTLKQEIAWATHLSLQACVIPPPKRSTCANYARVVNNILQGLTNMQLWLRIPLEKSESMEEDRDKSETVDSWEWWNSFRLLCEHSSQLYVALDILSSLPSMNSLGRWFGEPVRAAILQTDAFLTNARGYPCLSKRHQTLLTGFFNHSVQVIISGRSNHNVSQVSEGVLSRDENHTEDTPTQHALSPYLDYMAYLYQRMDPLPEQERFEINYRDFLQSPLQPLMDNLEAQTYETFEKDTVKYTQYQRAIAKALVDKVSDDEVSTARTVLMVVGAGRGPLVRASLQAAEETGRTLKVYAVEKNPNAVITLHSLIKLEGWESMVTIISSDMRCWDAPEKADILVSELLGSFGDNELSPECLDGAQRFLKPDGISIPSSYTSFIQPVTASKLHNDIKAHKDIAHFETAYVVKLHRVARLAPPQEVFSFAHPNFSPKATNQRYTKLQFELPQDTGSCLVHGFAGYFDAVLYKDVHLGIEPNTCTPNMFSWFPIFFPLRKPIYVPSESPIEVHFWRCCGATKVWYEWALVAPSPSPIHNSNGRSYWVGL

SEQ ID NO: 1029 - DNA, 1956 bp, Zea mays
  CDS (1)..(1956)
atgccgctggggcagcgtccgggggacaagagtgacgcccgctactgcggggcggaggtgctcgacttccctgccggcgaggacctccccgccgtcctcaaccactccctcgcctccgccttcgacttcatcctcgtccctctggttgatcccaactaccggccggcgcccggctccgttctgcccgtgtcggcgtcggacctcatccttggcccggcccagtggagcaaccacgtcgtcgggaagatcagcgagtggattgatttggactctgaggacgagcggctccgctttgactccgagctcacgctgaagcaggagattgcgtgggcgtctcacgtctcgctgcaggcatgtgttcttcctgcccccaggagatctttttgtggcaattatgccagagtcgtgaatcaaattttgcaaggcctgaccaatatgcatttgtggctcaggttgcctctggagaagtccgagcctatggatgatgatcttgataaaataaagaataacagccacacgagtgaaattgtagactcatgggaattatggaattcattcagattgctatgtgaccatagtagccaactatgtgtggcactcgatattttgagcactctgccatcaataaactcattagcaaggtggtttggagagcctgtaagggctgctattctgcaaaccgaggcttttcttacaaatgcaaaaggatatccttgtttatcaaagcgccatcagagtctgctaactggattttttaaacattctgttcaggtgataatatctggaagatcaaatcacaatgttttcccagtatctgaaggagtgctctcaggtgatgagagctacacagaagattcccatgttcgacatgcattaactccttaccttgaatacattgcgtacctatatcggaagatggatccgcttcctgagcaggaacgcattgagattaattacagggactttttgcagtctcctctgcagcctctaatggacaatttggaagctcaaacttatgagacatttgagaaggatgttgtgaagtacactcagtatcgaagagcagttgctaaggccttggttgatagggttgctgatgatgcagtctctacaactaggacggtgctgatggttgtgggagcaggacggggacctctagtacgagcatcattgcaggccgctgaagaaactggtcgcaaattaaaagtatatgctgttgaaaaaaatcctaacgctgttattactcttcatagtttgatcaaattggagggttgggaaagcctggttactgtaatttctagtgacatgcggtgttgggacgcccctgaaaaggcagatgttttggtcagtgaattgcttgggtcctttggtgacaatgaactatctcctgagtgtcttgatggtgctcagagattcttgaagcctgatgggatttccattccttcatcatacaccagtttcatccaaccaataatagcatcaaaattgcacaacgatatcaaagcacacaaagacattgcacattttgaaaccgcatatgttgtcaaactacaccgtatagcgacacttgcacctccacaacaggtttttactttcacccatccaaatttctcaccaaatgctagcaaccaaaggtacaccaagttgcaatttgaaatgctgccagatatgggttcatgccttgtgcatggatttgctggctattttgactctgtactttataaagatgttcatcttggaatcgagccaaacacagctacaccaaacatgtttagctggttccccatcttcttcccattgagaaaacccatctacgtgccggaagggtctcctatagaagtgcacttctggcggtgctgtgcccccacaaaggtgtggtacgagtgggctgtgactacaccgaccccgtcgccgatccacaacagcaatggccggtcctattgggttggtctatag

SEQ ID NO: 1030 - protein, 651 aa, Zea mays
MPLGQRPGDKSDARYCGAEVLDFPAGEDLPAVLNHSLASAFDFILVPLVDPNYRPAPGSVLPVSASDLILGPAQWSNHVVGKISEWIDLDSEDERLRFDSELTLKQEIAWASHVSLQACVLPAPRRSFCGNYARVVNQILQGLTNMHLWLRLPLEKSEPMDDDLDKIKNNSHTSEIVDSWELWNSFRLLCDHSSQLCVALDILSTLPSINSLARWFGEPVRAAILQTEAFLTNAKGYPCLSKRHQSLLTGFFKHSVQVIISGRSNHNVFPVSEGVLSGDESYTEDSHVRHALTPYLEYIAYLYRKMDPLPEQERIEINYRDFLQSPLQPLMDNLEAQTYETFEKDVVKYTQYRRAVAKALVDRVADDAVSTTRTVLMVVGAGRGPLVRASLQAAEETGRKLKVYAVEKNPNAVITLHSLIKLEGWESLVTVISSDMRCWDAPEKADVLVSELLGSFGDNELSPECLDGAQRFLKPDGISIPSSYTSFIQPIIASKLHNDIKAHKDIAHFETAYVVKLHRIATLAPPQQVFTFTHPNFSPNASNQRYTKLQFEMLPDMGSCLVHGFAGYFDSVLYKDVHLGIEPNTATPNMFSWFPIFFPLRKPIYVPEGSPIEVHFWRCCAPTKVWYEWAVTTPTPSPIHNSNGRSYWVGL

SEQ ID NO: 1031 - DNA, 2906 bp, Oryza sativa
  CDS (162)..(1910)
agaggctgaagccctaaattcccctcctccgccgaccaaaagccctaaaccctaaccccagccaacgcgtcttcctgcccatccccggcggcggcggcggcgtcagcggcggaggtcggcgactagtaccagcgaggaggaggagaagaaggcaaccggagatgccgctggggcaacgcgcgggggacaagagcgagtcccgctactgcggggtggaggtgctcgacttccccgccggcgaggagctccccgccgtcctctcccactccctctcctcctccttcgacttcctcctcgcccccctcgttgatcccgactaccggccgacgcccgggtccgtcctccccgtggcggcgtcggacctcgtcctcggcccggcccagtggagcagccacatcgtcgggaagatcagtgagtggattgatttggatgcggaggacgagcaactccggttggactccgagatcactctgaagcaggagattgcgtgggcgtctcatctctcgttgcaggcgtgcgttcttcctcctcccaagagatcttcttgtgccaactatgctagagttgtgaatcatattttgcaaggcctgaccaatttgcagttgtggcttaggatacctctggagaagtctgaacctatggatgaagaccatgatggagcaaaagataatagcgacatggttggctattcacttatcaggagcacactgccatctatgaattcactagggcggtggtttggggagcctgcttttctgacaaatgccagaggttatccttgcctgtcaaagcgccaccagaagctgcttactggattttttaaccattcggttcaggttataatatctgggagatcaaatcataacgtatcccaaggaggagtgctctcaggtgatgaaaaccacactgaagatactgctgttcggcatgcattgagcccataccttgactacattgcttacatatatcagaggatggacccacttcctgaacaggaacgctttgagatcaattatagggattttctgcaatctcctctccagcctctaatggacaatttggaagctcagacatacgagacttttgagaaagataccgtgaaatatacccagtatcaaagagcaattgctaaggcattggttgatagagtttccgatgatgatgtctcaacaacaaaaacagctgctgaggaaactggccgcaagctaaaagtatacgccgtcgagaaaaatcctaatgctgttatcacccttcacagtttgatcaaattggaaggatgggaaagcttggttactataatttcaagtgacatgcggtgctgggaagcccctgagaaagcagatattttggtcagtgagttgcttggttcctttggtgataatgaactttctcccgagtgtctagatggtgctcagagattcttgaagccagatgggatttctattccttcatcatacactagctttattgaacctataacagcatcaaaactacacaacgatatcaaagcacataaagatattgcacattttgaaactgcatatgttgtcaaactacaccgaatagcaagacttgcaccaacacaatcggtttttacttttgatcatccaaatccctcaccaaatgctagtaaccaaaggtataccaagttgaaatttgagataccacaagagacgggatcatgcctcgtgcacggatttgctggatattttgatgccgtattgtataaagatgttcatcttggaattgaaccaaacacggctacaccaaacatgtttagctggttcccgatcttcttcccattgagaaagcccatctacgtaccgtcgaagacgcctatagaagtgcacttttggcgatgctgcggtgcaacaaaggagaaaggggaagagagagagagaatcgagtgaataggagaagaagacaagacctgtgaggggttagaagaagaagacatgacctgtgaggggatagaaggagaaagagaatgtgagcaaacggctgatttgtccccgctgatggaggagaccgcgacggcggcggccgcggcggagaaggcgtcgtcgtataggtactgggtgcgggaggccaccggggacgccgcgccgctgcccgtcccccgcaagctcgacgcgaccgccgccgccgccgccaacgggaacggcaacccgccgccgctcggctccgtgtggaatcaggctggaacctgggaggaaaagaacctcaattcatgggctaacagtaggataaaggaaatgttgggttctttagattcgctagaattccctacagggaaggcatctcttgatggagtgtctaaatgcattggtgatgcctttctagtcaccgttcgtaataagaagagagtagggtatacctatgaactaagcttgaaatttaagggtgaatggttaattaaagaagaaaagatgaaggtcaaaggccatctggacattcctgagttttctttcggtgagctggaggacttggaggtagaagtaaggtttaccgatgacaagggcctcgcatccgacgacaagaggcagatttgcaaggacctcaagtccttcctttcacctatccgggagaaactgcgcgcattcgaagaagagctcaaggatagataacataatgaatgacatctaaccgacagcatcatcaaggcaagcaactaccctgctttcccaatattagcgtcgaatcatgtaaccatgtaacggcagcagaatgatcatctgagtttgatattcatgccttgttagatcacttaaggtcccatatttttcgcaatatccgatcgcatgtaactgcgactgtatgttgtagacactttgttgtaaactccggtcgtccagatgaatatgaagttatgaactgtcaaaaaaacaaaaaaaaaaaaaaacaca

SEQ ID NO: 1032 - protein, 582 aa, Oryza sativa
MPLGQRAGDKSESRYCGVEVLDFPAGEELPAVLSHSLSSSFDFLLAPLVDPDYRPTPGSVLPVAASDLVLGPAQWSSHIVGKISEWIDLDAEDEQLRLDSEITLKQEIAWASHLSLQACVLPPPKRSSCANYARVVNHILQGLTNLQLWLRIPLEKSEPMDEDHDGAKDNSDMVGYSLIRSTLPSMNSLGRWFGEPAFLTNARGYPCLSKRHQKLLTGFFNHSVQVIISGRSNHNVSQGGVLSGDENHTEDTAVRHALSPYLDYIAYIYQRMDPLPEQERFEINYRDFLQSPLQPLMDNLEAQTYETFEKDTVKYTQYQRAIAKALVDRVSDDDVSTTKTAAEETGRKLKVYAVEKNPNAVITLHSLIKLEGWESLVTIISSDMRCWEAPEKADILVSELLGSFGDNELSPECLDGAQRFLKPDGISIPSSYTSFIEPITASKLHNDIKAHKDIAHFETAYVVKLHRIARLAPTQSVFTFDHPNPSPNASNQRYTKLKFEIPQETGSCLVHGFAGYFDAVLYKDVHLGIEPNTATPNMFSWFPIFFPLRKPIYVPSKTPIEVHFWRCCGATKEKGEERERIE

SEQ ID NO: 1033 - DNA, 2182 bp, Arabidopsis thaliana
  CDS (209)..(2008)
cgagaaaaaaagattcacttccatctgcaaattccttcactccctgtgagctcgatagagagaagaagagatgccgctcggagagagaggaggatgggagaggaccgagtccaggtactgcggcgtcgagactgatttctccaacgatgttactcaccttctcaacttcaacatttccaccggcggttttgactatgtcctcgctcctatggtggacccttcgtataggccaagcttggtggaaggaaatggtgtagatactcaggttcttccagtctgtggctctgacttagtcttgtcaccttctcaatggagcagtcatgttgttggaaaaattagttcgtggattgacttggattctgaagatgaggtcttacggatggattcagaaaccacattgaagcaagaaatagcttgggctactcatctctccttacaggcatgtcttcttcccactcctaaagggaaatcgtgcgccaattatgccagatgtgtgaaccagatcttacaagggctgactaccttgcagttatggctaagggttccactgatgaagtctgaaggtgattcaatggatgatacctcagagggactggtaagacataatgattcctgggagctgtggaattcgtttcgtcttctttgtgagcatgacagtaagctgtctgttgctcttgatgttctgagtgcactaccctctgaaacttcactagggcgctggatgggagagtctgtgagagcagccatattaagcactgatgctttcttaacaaatgctcggggttatccttgcttgtccaaacgccaccaaaagttaatagcaggattttttgatcatgctgcccaggttgtaatttctggaaagcctgttcataatcttcaaaagcctcttgattctagcacggaaggtacagagaagaatcctctgcgcatatatttggactatgttgcttatctgttccaaaagatggaatcacttcctgaacaggaacgcatcgagctgggttaccgggattttttgcaggcacccctgcagcctcttatggacaacctcgaagcccaaacctatgagacgtttgagagagactctgttaaatacatccaatatcaaagagcagttgagaaagccttggtggacagggtacctgatgaaaaagcatccgagttgactactgtcctgatggttgtgggggcaggaaggggaccccttgtgagggcatcgttacaggcagctgaagaaactgatcggaagttgaaagtttatgccgtggaaaagaatcataatgccgttgtaacactccataatttggttaagatggaaggatgggaagacgttgttacgataatatcttgtgacatgcgtttttggaatgctcccgagcaagctgatatattggttagcgaactgctgggttcttttggagacaatgaactttctcctgagtgtcttgatggagctcaaaggtttctgaagccagacggaatttcaataccatcctcgtatacaagtttcatacagcctgtaacagcttcgaagctttacaatgacgttaaggctcataaagatcttgcgcactttgaaactgcttatgttgtcaagctgcatagtgtagcaaagcttgctccttcccaatctgttttcacatttactcatccaaacttgtcaacaaaagtcaacaaccaacgctataagaagcttcagttcaatctaccaagcgatgctggctcagctttggtgcatggattcgctggctattttgattccgtcctttataaagatgttcatcttgggatcgagcctacaacagcaacaccaaacatgttcagctggttcccaatctttttcccattgaggaagcctgtggaggttcaccctgatactccattagaagtacacttttggaggtgttgtggttcctcaaaggtttggtatgaatggtcggtgtcttcacctactccatctccgatgcataacaccaatggccgttcgtactgggttggcctttaggattagagacttttgactgatgacgaaaaagttatgtaatcttattgtgctgtatttttgtcttaagaaagactaaagtttacgagtgaattaaatctcttttgaccttatttatgtttgtactttttcagtaatttcattgcacttttaatacaaagctatctctttcatccc

SEQ ID NO: 1034 - protein, 599 aa, Arabidopsis thaliana
MVDPSYRPSLVEGNGVDTQVLPVCGSDLVLSPSQWSSHVVGKISSWIDLDSEDEVLRMDSETTLKQEIAWATHLSLQACLLPTPKGKSCANYARCVNQILQGLTTLQLWLRVPLMKSEGDSMDDTSEGLVRHNDSWELWNSFRLLCEHDSKLSVALDVLSALPSETSLGRWMGESVRAAILSTDAFLTNARGYPCLSKRHQKLIAGFFDHAAQVVISGKPVHNLQKPLDSSTEGTEKNPLRIYLDYVAYLFQKMESLPEQERIELGYRDFLQAPLQPLMDNLEAQTYETFERDSVKYIQYQRAVEKALVDRVPDEKASELTTVLMVVGAGRGPLVRASLQAAEETDRKLKVYAVEKNHNAVVTLHNLVKMEGWEDVVTIISCDMRFWNAPEQADILVSELLGSFGDNELSPECLDGAQRFLKPDGISIPSSYTSFIQPVTASKLYNDVKAHKDLAHFETAYVVKLHSVAKLAPSQSVFTFTHPNLSTKVNNQRYKKLQFNLPSDAGSALVHGFAGYFDSVLYKDVHLGIEPTTATPNMFSWFPIFFPLRKPVEVHPDTPLEVHFWRCCGSSKVWYEWSVSSPTPSPMHNTNGRSYWVGL

SEQ ID NO: 1035 - DNA, 1755 bp, Arabidopsis thaliana
  CDS (1)..(1755)
atgccgctcggagagagaggaggatgggagaggaccgagtccagatactgcggcgttgagactgatttctccaacgatgttactcatcttctcaacttcaacatttccaccggcggttttgactatgttctcgctcctctggtggatccttcgtataggccgagcttggtggaaggaaatggtgtagatactcaggttcttccagtctgtggctctgacttagtcttgtcaccttctcaatggagcagtcatgttgttggaaaaattagttcgtggattgacttggattctgaagatgaggtcttacggatggattcagaaaccacattgaagcaagaaatagcttgggctactcatctctccttacaggcatgccttcttcccactcctaaagggaaatcgtgcgccaattatgccagatgtgtgaaccagatcttacaaggcctcactaccttgcagttatggctaagggttccactggtgaagtctgaaggtgattcaatggatgatacctcagagggactgaatgattcctgggagctgtggaattcgtttcgtcttctttgtgagcatgacagtaagctgtctgttgctcttgatgttctgagtacactaccctctgaaacttcactagggcgctggatgggagagtctgtgagagcagccatattaagcactgatgctttcttaacaaatgctcggggttatccttgcttgtccaaacgccaccaaaagttaatagcaggattttttgatcatgctgcccaggttgtaatttgtggaaagcctgttcataatcttcaaaagcctcttgattctagctcggagggtacagagaagaatcctctgcgcatatatttggactatgttgcttatctgttccaaaagatggaatcactttctgaacaggaacgcatcgagctgggttacagggattttttgcaggcacccctgcagcctcttatggacaacctcgaagcccaaacctatgagacgtttgagagagactctgttaaatacatccaatatcaaagagcagttgagaaagccttggtggacagggtacctgatgaaaaagcatccgagttgactactgtcctgatggttgtgggggcaggaaggggaccccttgtgagggcatcgttacaggcagctgaagaaactgatcggaagttgaaagtttatgccgtggaaaagaatcctaatgccgttgtaacactccataatttggttaagatggaaggatgggaagacgttgttacgataatatcctgtgacatgcgtttttggaatgctcccgagcaagctgatatattggttagcgaactgctgggttcttttggagacaatgaactttctcctgagtgtcttgatggagcccaaaggtttctgaagccagacggaatttcaataccatcctcgtatacaagtttcatacagcctataacagcttcgaagctttacaatgacgttaaggctcataaagatcttgcgcactttgaaactgcttatgttgtcaagctgcatagtgtagcaaagcttgctccttcccagtctgttttcacatttactcatccaaacttctcaacgaaagtcaacaaccaacgctataagaagcttcagttcagtctaccaagcgatgctggctcagctttggtgcatggattcgctggctattttgattccgtcctttataaagatgttcatcttgggatcgagcctacaacagcaacaccaaacatgttcagctggtaa

SEQ ID NO: 1036 - protein, 584 aa, Arabidopsis thaliana
MPLGERGGWERTESRYCGVETDFSNDVTHLLNFNISTGGFDYVLAPLVDPSYRPSLVEGNGVDTQVLPVCGSDLVLSPSQWSSHVVGKISSWIDLDSEDEVLRMDSETTLKQEIAWATHLSLQACLLPTPKGKSCANYARCVNQILQGLTTLQLWLRVPLVKSEGDSMDDTSEGLNDSWELWNSFRLLCEHDSKLSVALDVLSTLPSETSLGRWMGESVRAAILSTDAFLTNARGYPCLSKRHQKLIAGFFDHAAQVVICGKPVHNLQKPLDSSSEGTEKNPLRIYLDYVAYLFQKMESLSEQERIELGYRDFLQAPLQPLMDNLEAQTYETFERDSVKYIQYQRAVEKALVDRVPDEKASELTTVLMVVGAGRGPLVRASLQAAEETDRKLKVYAVEKNPNAVVTLHNLVKMEGWEDVVTIISCDMRFWNAPEQADILVSELLGSFGDNELSPECLDGAQRFLKPDGISIPSSYTSFIQPITASKLYNDVKAHKDLAHFETAYVVKLHSVAKLAPSQSVFTFTHPNFSTKVNNQRYKKLQFSLPSDAGSALVHGFAGYFDSVLYKDVHLGIEPTTATPNMFSW

SEQ ID NO: 1037 - DNA, 1950 bp, Oryza sativa (japonica cultivar-group)
  CDS (1)..(1950)
atgccgctggggcaacgcgcgggggacaagagcgagtcccgctactgcggggtggaggtgctcgacttccccgccggcgaggagctccccgccgtcctctcccactccctctcctcctccttcgacttcctcctcgcccccctcgttgatcccgactaccggccgacgcccgggtccgtcctccccgtggcggcgtcggacctcgtcctcggcccggcccagtggagcagccacatcgtcgggaagatcagtgagtggattgatttggatgcggaggacgagcaactccggttggactccgagatcactctgaagcaggagattgcgtgggcgtctcatctctcgttgcaggcgtgcgttcttcctcctcccaagagatcttcttgtgccaactatgctagagttgtgaatcatattttgcaaggcctgaccaatttgcagttgtggcttaggatacctctggagaagtctgaacctatggatgaagaccatgatggagcaaaagataatagcgacatgagtgataccgtagactcttgggaatggtggaattcatttagactattatgtgagcatagcagtcaactgtgtgtggcgcttgatgttttgagcacactgccatctatgaattcactagggcggtggtttggggagcctgtaagagctgcaattcttcaaacaaatgcttttctgacaaatgccagaggttatccttgcctgtcaaagcgccaccagaagctgcttactggattttttaaccattcggttcaggttataatatctgggagatcaaatcataacgtatcccaaggaggagtgctctcaggtgatgaaaaccacactgaagatactgctgttcggcatgcattgagcccataccttgactacattgcttacatatatcagaggatggacccacttcctgaacaggaacgctttgagatcaattatagggattttctgcaatctcctctccagcctctaatggacaatttggaagctcagacatacgagacttttgagaaagataccgtgaaatatacccagtatcaaagagcaattgctaaggcattggttgatagagtttccgatgatgatgtctcaacaacaaaaacagtgctgatggttgttggagcaggccgggggccactagtgagagcgtcgttacaggctgctgaggaaactggccgcaagctaaaagtatacgccgtcgagaaaaatcctaatgctgttatcacccttcacagtttgatcaaattggaaggatgggaaagcttggttactataatttcaagtgacatgcggtgctgggaagcccctgagaaagcagatattttggtcagtgagttgcttggttcctttggtgataatgaactttctcccgagtgtctagatggtgctcagagattcttgaagccagatgggatttctattccttcatcatacactagctttattgaacctataacagcatcaaaactacacaacgatatcaaagcacataaagatattgcacattttgaaactgcatatgttgtcaaactacaccgaatagcaagacttgcaccaacacaatcggtttttacttttgatcatccaaatccctcaccaaatgctagtaaccaaaggtataccaagttgaaatttgagataccacaagagacgggatcatgcctcgtgcacggatttgctggatattttgatgccgtattgtataaagatgttcatcttggaattgaaccaaacacggctacaccaaacatgtttagctggttcccgatcttcttcccattgagaaagcccatctacgtaccgtcgaagacgcctatagaagtgcacttttggcgatgctgcggtgcaacaaaggtgtggtacgagtgggctgtgacggcaccttctccatcaccaatccataacagcaatggtcgatcatattgggtcggcctataa

SEQ ID NO: 1038 - protein, 649 aa, Oryza sativa (japonica cultivar-group)
MPLGQRAGDKSESRYCGVEVLDFPAGEELPAVLSHSLSSSFDFLLAPLVDPDYRPTPGSVLPVAASDLVLGPAQWSSHIVGKISEWIDLDAEDEQLRLDSEITLKQEIAWASHLSLQACVLPPPKRSSCANYARVVNHILQGLTNLQLWLRIPLEKSEPMDEDHDGAKDNSDMSDTVDSWEWWNSFRLLCEHSSQLCVALDVLSTLPSMNSLGRWFGEPVRAAILQTNAFLTNARGYPCLSKRHQKLLTGFFNHSVQVIISGRSNHNVSQGGVLSGDENHTEDTAVRHALSPYLDYIAYIYQRMDPLPEQERFEINYRDFLQSPLQPLMDNLEAQTYETFEKDTVKYTQYQRAIAKALVDRVSDDDVSTTKTVLMVVGAGRGPLVRASLQAAEETGRKLKVYAVEKNPNAVITLHSLIKLEGWESLVTIISSDMRCWEAPEKADILVSELLGSFGDNELSPECLDGAQRFLKPDGISIPSSYTSFIEPITASKLHNDIKAHKDIAHFETAYVVKLHRIARLAPTQSVFTFDHPNPSPNASNQRYTKLKFEIPQETGSCLVHGFAGYFDAVLYKDVHLGIEPNTATPNMFSWFPIFFPLRKPIYVPSKTPIEVHFWRCCGATKVWYEWAVTAPSPSPIHNSNGRSYWVGL

SEQ ID NO: 1039 - DNA, 1533 bp, Arabidopsis thaliana
  CDS (1)..(1533)
atgccgctcggagagagaggaggatgggggaggaccgagtccagatactgcggcgttgagactgatttctccaacgatgttactcatcttctcaacttcaacatttccaccggcggttttgactatgttctcgctcctctggtggatccttcgtataggccgagcttggtggaaggaaatggtgtagatactcaggttcttccagtctgtggctctgacttagtcttgtcaccttctcaatggagcagtcatgttgttggaaaaattagttcgtggattgacttggattctgaagatgaggtcttacggatggattcagaaaccacattgaagcaagaaatagcttgggctactcatctctccttacaggcatgccttcttcccactcctaaagggaaatcgtgcgccaattatgccagatgtgtgaaccagatcttacaaggcctcactaccttgcagttatggctaagggttccactggtgaagtctgaaggtgattcaatggatgatacctcagagggactgaatgattcctgggagctgtggaattcgtttcgtcttctttgtgagcatgacagtaagctgtctgttgctcttgatgttctgagtacactaccctctgaaacttcactagggcgctggatgggagagtctgtgagagcagccatattaagcactgatgctttcttaacaaatgctcggggttatccttgcttgtccaaacgccaccaaaagttaatagcaggattttttgatcatgctgcccaggttgtaatttgtggaaagcctgttcataatcttcaaaagcctcttgattctagctcggagggtacagagaagaatcctctgcgcatatatttggactatgttgcttatctgttccaaaagatggaatcactttctgaacaggaacgcatcgagctgggttacagggattttttgcaggcacccctgcagcctcttatggacaacctcgaagcccaaacctatgagacgtttgagagagactctgttaaatacatccaatatcaaagagcagttgagaaagccttggtggacagggtacctgatgaaaaagcatccgagttgactactgtcctgatggttgtgggggcaggaaggggaccccttgtgagggcatcattacaggcagctgaagaaactgatcggaagttgaaagtttatgccgtggaaaagaatcctaatgccgttgtaacactccataatttggttaagatggaaggatgggaagacgttgttacgataatatcctgtgacatgcgtttttggaatgctcccgagcaagctgatatattggttagcgaactgctgggttcttttggagacaatgaactttctcctgagtgtcttgatggagcccaaaggtttctgaagccagacggaatttcaataccatcctcgtatacaagtttcatacagcctataacagcttcgaagctttacaatgacgtaaggctcataaagatcttgcgcactttgaaactgcttatgttgtcaagctgcatagtgtag

SEQ ID NO: 1040 - protein, 510 aa, Arabidopsis thaliana
MPLGERGGWGRTESRYCGVETDFSNDVTHLLNFNISTGGFDYVLAPLVDPSYRPSLVEGNGVDTQVLPVCGSDLVLSPSQWSSHVVGKISSWIDLDSEDEVLRMDSETTLKQEIAWATHLSLQACLLPTPKGKSCANYARCVNQILQGLTTLQLWLRVPLVKSEGDSMDDTSEGLNDSWELWNSFRLLCEHDSKLSVALDVLSTLPSETSLGRWMGESVRAAILSTDAFLTNARGYPCLSKRHQKLIAGFFDHAAQVVICGKPVHNLQKPLDSSSEGTEKNPLRIYLDYVAYLFQKMESLSEQERIELGYRDFLQAPLQPLMDNLEAQTYETFERDSVKYIQYQRAVEKALVDRVPDEKASELTTVLMVVGAGRGPLVRASLQAAEETDRKLKVYAVEKNPNAVVTLHNLVKMEGWEDVVTIISCDMRFWNAPEQADILVSELLGSFGDNELSPECLDGAQRFLKPDGISIPSSYTSFIQPITASKLYNDVRLIKILRTLKLLMLSSCIV

SEQ ID NO: 1041 - DNA, 1962 bp, Zea mays
  CDS (1)..(1962)
atgccgctggggcagcgttcgggggacaagagcgactcccgctactgcggggtggaggttctcgacttccccgccggggagggcctccctgccgtcctcaatcactccctcgcctccgccttcgacttcatcctcgcccctctggttgatcccaactaccggccggcgcccggcgccgttctgccagtgtcagcgtcggacctcgtcctcggcccgtcccagtggagcaaccacgtcgtcgggaagatcagcgagtggattgatttggacgcggaggacgagcggctcctgctggactccgagctcacgctgaagcaggagatcgcttgggcatctcacgtttcgctgcaggcatgtgttattcctgcccccaggagatctttttgcggcaattatgccagagttgtgaatcaaattttgcaaggcctgaccaatatgaatttgtggcttaggttgcctctggagaagtccgagcctatggatggtgatcttgataaaataaagaacaacaaccacacgctacagagtgaaatagcagactcatgggaattatggaattcattcagattgctatgtgaccatagtagccaactatgcgtggcacttgatatttcgggcacactgccatcaatgaactcattagggcgctggtttggggagcctgtaagggctgctattctgcaaaccaatgcttttcttacaaatgcaagaggatatccttgtttatcaaagcggcatcagaggctgctaactggactttttaatcattctgttcaggcgataatctctgggagatcgaatcacaatgtttttccagcatctgaaggagtgctctcaggcgatgagggcaacgctgaagattcctctgttcgacatgcattagctccgtacctggagtacattgcatacctgtatcagaagatggatccgcttcctgagcaggaacgctttgagattaattacagggattttttgcagtctcctctccagcctctaatggataatttggaagctcagacttacgagacttttgagaaggatgttgtgaagtatactcagtatcgaagagcagttgctaaggccttggttgatagggttgcagatgatgcagtctccacaactaggacggttctgatggttgtgggagcaggccgagggcctctagtaagagcatcattgcaggctgctgaagaaactggtcgcaagttaaaagtatatgctgttgaaaaaaatcctaacgctgttattactcttcatagtttgatcaaattggagggttgggaaagcctggttactgtaatttctagtgacatgcggtgttgggatgcccctgaaaaggctgatattttggtcagcgaattgcttgggtcctttggtgacaatgaactatctcctgagtgtcttgatggtgctcaaagattcttgaagcctgatgggatttcctttccttcatcatacaccagcttcatccaaccaataacagcgtcaaaattgcacgacgacatcaaagcacacaaagatattgcacattttgaaacggcatatgttgtgaaactacaccgcatagcgacacttgcacctccacaacaggtttttactttcacccatccaaatttctcaccaaatgccagcaaccaaaggtacaccaagttgcaatttgaaatgctgccagacatgggttcatgccttgtgcacggatttgctggctattttgactctgttctttataaggatgttcatcttggaatcgagccaaacaccgctacaccaaacatgttcagctggttcccgatcttcttcccattgagaaagcccatctacgtgcccgaagggtctcctatagaagtgcacttctggcggtgctgtgcccccacgaaggtgtggtacgagtgggctgtgactacgccgaccccgtcgccgatccacaacagcaatggccggtcctattgggttggtctataa

SEQ ID NO: 1042 - protein, 653 aa, Zea mays
MPLGQRSGDKSDSRYCGVEVLDFPAGEGLPAVLNHSLASAFDFILAPLVDPNYRPAPGAVLPVSASDLVLGPSQWSNHVVGKISEWIDLDAEDERLLLDSELTLKQEIAWASHVSLQACVIPAPRRSFCGNYARVVNQILQGLTNMNLWLRLPLEKSEPMDGDLDKIKNNNHTLQSEIADSWELWNSFRLLCDHSSQLCVALDISGTLPSMNSLGRWFGEPVRAAILQTNAFLTNARGYPCLSKRHQRLLTGLFNHSVQAIISGRSNHNVFPASEGVLSGDEGNAEDSSVRHALAPYLEYIAYLYQKMDPLPEQERFEINYRDFLQSPLQPLMDNLEAQTYETFEKDVVKYTQYRRAVAKALVDRVADDAVSTTRTVLMVVGAGRGPLVRASLQAAEETGRKLKVYAVEKNPNAVITLHSLIKLEGWESLVTVISSDMRCWDAPEKADILVSELLGSFGDNELSPECLDGAQRFLKPDGISFPSSYTSFIQPITASKLHDDIKAHKDIAHFETAYVVKLHRIATLAPPQQVFTFTHPNFSPNASNQRYTKLQFEMLPDMGSCLVHGFAGYFDSVLYKDVHLGIEPNTATPNMFSWFPIFFPLRKPIYVPEGSPIEVHFWRCCAPTKVWYEWAVTTPTPSPIHNSNGRSYWVGL

SEQ ID NO: 1043 - DNA, 1956 bp, Zea mays
  CDS (1)..(1956)
atgccgctggggcagcgtccgggggacaagagtgacgcccgctactgcggggcggaggtgctcgacttccctgccggcgaggacctccccgccgtcctcaaccactccctcgcctccgccttcgacttcatcctcgtccctctggttgatcccaactaccggccggcgcccggctccgttctgcccgtgtcggcgtcggacctcatccttggcccggcccagtggagcaaccacgtcgtcgggaagatcagcgagtggattgatttggactctgaggacgagcggctccgctttgactccgagctcacgctgaagcaggagattgcgtgggcgtctcacgtctcgctgcaggcatgtgttcttcctgcccccaggagatctttttgtggcaattatgccagagtcgtgaatcaaattttgcaaggcctgaccaatatgcatttgtggctcaggttgcctctggagaagtccgagcctatggatgatgatcttgataaaataaagaataacagccacacgagtgaaattgtagactcatgggaattatggaattcattcagattgctatgtgaccatagtagccaactatgtgtggcactcgatattttgagcactctgccatcaataaactcattagcaaggtggtttggagagcctgtaagggctgctattctgcaaaccgaggcttttcttacaaatgcaaaaggatatccttgtttatcaaagcgccatcagagtctgctaactggattttttaaacattctgttcaggtgataatatctggaagatcaaatcacaatgttttcccagtatctgaaggagtgctctcaggtgatgagagctacacagaagattcccatgttcgacatgcattaactccttaccttgaatacattgcgtacctatatcggaagatggatccgcttcctgagcaggaacgcattgagattaattacagggactttttgcagtctcctctgcagcctctaatggacaatttggaagctcaaacttatgagacatttgagaaggatgttgtgaagtacactcagtatcgaagagcagttgctaaggccttggttgatagggttgctgatgatgcagtctctacaactaggacggtgctgatggttgtgggagcaggacggggacctctagtacgagcatcattgcaggccgctgaagaaactggtcgcaaattaaaagtatatgctgttgaaaaaaatcctaacgctgttattactcttcatagtttgatcaaattggagggttgggaaagcctggttactgtaatttctagtgacatgcggtgttgggacgcccctgaaaaggcagatgttttggtcagtgaattgcttgggtcctttggtgacaatgaactatctcctgagtgtcttgatggtgctcagagattcttgaagcctgatgggatttccattccttcatcatacaccagcttcatccaaccaataacagcatcaaaattgcacaacgacatcaaagcacacaaagacattgcacattttgaaaccgcatatgttgtcaaactacaccgcatagcgacacttgcacctccacaacaggtttttactttcacccatccaaatttctcaccaaatgctagcaaccaaaggtacaccaagttgcaatttgaaatgctgccagacatgggttcatgccttgtgcacggatttgctggctattttgactctgttctttataaggatgttcatcttggaatcgagccaaacaccgctacaccaaacatgttcagctggttccccatcttcttcccattgagaaaacccatctacgtgcccgaagggtctcctatagaagtgcacttctggcggtgctgtgcccccacaaaggtgtggtacgagtgggctgtgactacaccgaccccgtcgccgatccacaacagcaatggccggtcctattgggttggtctatag

SEQ ID NO: 1044 - protein, 651 aa, Zea mays
MPLGQRPGDKSDARYCGAEVLDFPAGEDLPAVLNHSLASAFDFILVPLVDPNYRPAPGSVLPVSASDLILGPAQWSNHVVGKISEWIDLDSEDERLRFDSELTLKQEIAWASHVSLQACVLPAPRRSFCGNYARVVNQILQGLTNMHLWLRLPLEKSEPMDDDLDKIKNNSHTSEIVDSWELWNSFRLLCDHSSQLCVALDILSTLPSINSLARWFGEPVRAAILQTEAFLTNAKGYPCLSKRHQSLLTGFFKHSVQVIISGRSNHNVFPVSEGVLSGDESYTEDSHVRHALTPYLEYIAYLYRKMDPLPEQERIEINYRDFLQSPLQPLMDNLEAQTYETFEKDVVKYTQYRRAVAKALVDRVADDAVSTTRTVLMVVGAGRGPLVRASLQAAEETGRKLKVYAVEKNPNAVITLHSLIKLEGWESLVTVISSDMRCWDAPEKADVLVSELLGSFGDNELSPECLDGAQRFLKPDGISIPSSYTSFIQPITASKLHNDIKAHKDIAHFETAYVVKLHRIATLAPPQQVFTFTHPNFSPNASNQRYTKLQFEMLPDMGSCLVHGFAGYFDSVLYKDVHLGIEPNTATPNMFSWFPIFFPLRKPIYVPEGSPIEVHFWRCCAPTKVWYEWAVTTPTPSPIHNSNGRSYWVGL

SEQ ID NO: 1045 - DNA, 2267 bp, Glycine max
  CDS (115)..(2046)
agcgaagccctcaacaccactctgtgaagtgaacacacagcatgctcgaaatcgcttgagctcactatcgatatcaccccaaactcgaccacactaatagttgaagcagcgagaatgcctctgggagaaagagcaggggataagagcgagtctcgctactgcggtgtagagaccgacttcaacgatgacatgccacacgtcctccatttcaacctttattctggaagcttcgatttcgttgttgctcctctgatggatcattcttatcggccaagtttagtgcaaaaggatgctttggggtctggtgttctgccatttgctgggtcagacttggtcttgagtccatcccagtggagtagtcatgtagtgggaaaaattagctcatggatagatttggattcagaggatgaaaccctcaggatagattctgaaaccactcttaaacaagaaattgcttgggcttctcatctctctttacaggcctgcctgcttcctgccccgaagggaacttcttgtgctaattatgctagatgtgtgaatcagatcttacagggttcaaataatatgcagttgtggcttagggttccattggtgaagcctgatgatgactctatggatgcaaagtctgttgctttggttgactcttgggaaacttggaattcatttcgtctgctgtgtgagcatcatagtcaactgtcagttgcacttgatattctgagtactcttccttccccaaattcactaggacgctggtttggggagcctgttagagcagctatattacatactgattgctttctaactaattctcatggctgtccatgcctctccaagcgccaccagagtttaattactggtttttttaaccattctattcagatcattgtatctggaaattcagttcatccaaaagcaagtgtggatgcaaatgataattctggtacaaattcacaaaggcatcccttgcggccatatctggactacattggatatctttaccaaagaatggatcctcttcctgagcaagaacgttttgagcttggttacagggattttttacagtcacccttgcaacctttgatggataatttagaggctcagacttacgagacttttgagagagatgcagtgaaatacattcagtaccaacgagcagtcagtaaagcattgctggacagggttcctgatgaagaggcatctgttaaaaccattgtattgatggttgtgggggcaggacgtgggcctcttgtgcgggcatcattacaggctgctgaagaaactgggcggaagctcaaagtttatgctgttgaaaagaatccaaatgctgttgttaccctacatgcattagtcaagttagaaggatgggaggatactgtgaccatagtctcaagtgacatgcgtcattggagtgcccctgaaaaagctgacatattggttagtgaattgctaggttcttttggcgacaatgagctgtctcctgagtgccttgatggagcccagagatttctaaagcaagatggaatttcaataccatcttcgtacacaagtttcctccaaccagtgacagcttcaaagttatataatgatgttaaggcacataaagatcttgtacactttgaaactgcttatgttgtcaaaatgcacaatgtagccaaacttgcaccaacccaacctgtttttacatttactcatccaaagcactctgataaagaaatcaatcagcgctataaaaagttgaattttataatacctaatgacactgggtcagcaatggtacacggatttgctggttattttgatgcaactctttacaaggatgtgcatcttggaattgaaccttcaactgcaacaccaaacatgttcagttggtttgcaatatttttcccattaaggacacccatttgtgtggatcccggttctacacttgaagtacatttttggcgttgttgtggttctacgaaggtttggtatgagtggtgtgttgcttctcccgcgtcgtccccaatgcacaacagtaatggacgttcatactgggttgggctttagtgccttgtattttttagaatgtttatcagtcttgagtagtcaagtttataatgttgcaaatcagggtcaatacaaagttttttggagcaagcatcttggtggatctcttcaattcaattcattttgggaaattttgttgtacaataagatattttgtttgctataggtgtccttaatgcttccatccaatgtaattattttatagcaaaaaaaaaaaaaaa

SEQ ID NO: 1046 - protein, 643 aa, Glycine max
MPLGERAGDKSESRYCGVETDFNDDMPHVLHFNLYSGSFDFVVAPLMDHSYRPSLVQKDALGSGVLPFAGSDLVLSPSQWSSHVVGKISSWIDLDSEDETLRIDSETTLKQEIAWASHLSLQACLLPAPKGTSCANYARCVNQILQGSNNMQLWLRVPLVKPDDDSMDAKSVALVDSWETWNSFRLLCEHHSQLSVALDILSTLPSPNSLGRWFGEPVRAAILHTDCFLTNSHGCPCLSKRHQSLITGFFNHSIQIIVSGNSVHPKASVDANDNSGTNSQRHPLRPYLDYIGYLYQRMDPLPEQERFELGYRDFLQSPLQPLMDNLEAQTYETFERDAVKYIQYQRAVSKALLDRVPDEEASVKTIVLMVVGAGRGPLVRASLQAAEETGRKLKVYAVEKNPNAVVTLHALVKLEGWEDTVTIVSSDMRHWSAPEKADILVSELLGSFGDNELSPECLDGAQRFLKQDGISIPSSYTSFLQPVTASKLYNDVKAHKDLVHFETAYVVKMHNVAKLAPTQPVFTFTHPKHSDKEINQRYKKLNFIIPNDTGSAMVHGFAGYFDATLYKDVHLGIEPSTATPNMFSWFAIFFPLRTPICVDPGSTLEVHFWRCCGSTKVWYEWCVASPASSPMHNSNGRSYWVGL

SEQ ID NO: 1047 - DNA, 2298 bp, Zea mays
  CDS (164)..(2119)
tttcgtcctgctccccgcccggcgcccgcggcccgccgctcaaacccctaaaccctagccgcaccagcgccctattccctccttcggcggctccggcagcgggcggtcactagcaaccagcatcgtacggggaagaagcgccgtttacacccatctggcggagatgccgctggggcagcgtccgggggacaagagtgacgcccgctactgcggggcggaggtgctcgacttccctgccggcgaggacctccccgccgtcctcaaccactccctcgcctccgccttcgacttcatcctcgtccctctggttgatcccaactaccggccggcgcccggctccgttctgcccgtgtcggcgtcggacctcatccttggcccggcccagtggagcaaccacgtcgtcgggaagatcagcgagtggattgatttggactctgaggacgagcggctccgctttgactccgagctcacgctgaagcaggagattgcgtgggcgtctcacgtctcgctgcaggcatgtgttcttcctgcccccaggagatctttttgtggcaattatgccagagtcgtgaatcaaattttgcaaggcctgaccaatatgcatttgtggctcaggttgcctctggagaagtccgagcctatggatgatgatcttgataaaataaagaataacagccacacgagtgaaattgtagactcatgggaattatggaattcattcagattgctatgtgaccatagtagccaactatgtgtggcactcgatattttgagcactctgccatcaataaactcattagcaaggtggtttggagagcctgtaagggctgctattctgcaaaccgaggcttttcttacaaatgcaaaaggatatccttgtttatcaaagcgccatcagagtctgctaactggattttttaaacattctgttcaggtgataatatctggaagatcaaatcacaatgttttcccagtatctgaaggagtgctctcaggtgatgagagctacacagaagattcccatgttcgacatgcattaactccttaccttgaatacattgcgtacctatatcggaagatggatccgcttcctgagcaggaacgcattgagattaattacagggactttttgcagtctcctctgcagcctctaatggacaatttggaagctcaaacttatgagacatttgagaaggatgttgtgaagtacactcagtatcgaagagcagttgctaaggccttggttgatagggttgctgatgatgcagtctctacaactaggacggtgctgatggttgtgggagcaggacggggacctctagtacgagcatcattgcaggccgctgaagaaactggtcgcaaattaaaagtatatgctgttgaaaaaaatcctaacgctgttattactcttcatagtttgatcaaattggagggttgggaaagcctggttactgtaatttctagtgacatgcggtgttgggacgcccctgaaaaggcagatgttttggtcagtgaattgcttgggtcctttggtgacaatgaactatctcctgagtgtcttgatggtgctcagagattcttgaagcctgatgggatttccattccttcatcatacaccagtttcatccaaccaataatagcatcaaaattgcacaacgatatcaaagcacacaaagacattgcacattttgaaaccgcatatgttgtcaaactacaccgtatagcgacacttgcacctccacaacaggtttttactttcacccatccaaatttctcaccaaatgctagcaaccaaaggtacaccaagttgcaatttgaaatgctgccagatatgggttcatgccttgtgcatggatttgctggctattttgactctgtactttataaagatgttcatcttggaatcgagccaaacacagctacaccaaacatgtttagctggttccccatcttcttcccattgagaaaacccatctacgtgccggaagggtctcctatagaagtgcacttctggcggtgctgtgcccccacaaaggtgtggtacgagtgggctgtgactacaccgaccccgtcgccgatccacaacagcaatggccggtcctattgggttggtctatagtaaggcaatcaagatggtcgctttgtgttgtaacagagaagaaaaaagaacagagagatgatagggtccagttctatttgagccggatgctactggtttctgcccggaggagcagatcaaaggatctgtaacgcgttgttatctgaaaggtgcttgacctcaaaaaaaaaaaaaaaaaa

SEQ ID NO: 1048 - protein, 651 aa, Zea mays; identical to SEQ ID NO: 1030

SEQ ID NO: 1049 - DNA, 1932 bp, Glycine max
  CDS (1)..(1932)
atgcctctgggagaaagagcaggggataagagcgagtctcgctactgcggtgtagagaccgacttcaacgatgacatgccacacgtcctccatttcaacctttattctggaagcttcgatttcgttgttgctcctctgatggatcattcttatcggccaagtttagtgcaaaaggatgctttggggtctggtgttctgccatttgctgggtcagacttggtcttgagtccatcccagtggagtagtcatgtagtgggaaaaattagctcatggatagatttggattcagaggatgaaaccctcaggatagattctgaaaccactcttaaacaagaaattgcttgggcttctcatctctctttacaggcctgcctgcttcctgccccgaagggaacttcttgtgctaattatgctagatgtgtgaatcagatcttacagggttcaaataatatgcagttgtggcttagggttccattggtgaagcctgatgatgactctatggatgcaaagtctgttgctttggttgactcttgggaaacttggaattcatttcgtctgctgtgtgagcatcatagtcaactgtcagttgcacttgatattctgagtactcttccttccccaaattcactaggacgctggtttggggagcctgttagagcagctatattacatactgattgctttctaactaattctcatggctgtccatgcctctccaagcgccaccagagtttaattactggtttttttaaccattctattcagatcattgtatctgcaaattcagttcatccaaaagcaagtgtagatgcaaatgataattctgatacaaattcacaaaagcatcccttgcggccatatctggactacattggatatctttaccaaagaatggatcctcttcctgagcaagaacgttttgagcttggttacagggattttttacagtcacccttgcaacctttgatggataatttagaggctcagacttacgagacttttgagagagatgcagtgaaatacattcagtaccaacgagcagtcagtaaagcattgctggacagggttcctgatgaagaggcatctgttaaaaccattgtattgatggttgtgggggcaggacgtgggcctcttgtgcgggcatcattacaggctgctgaagaaactgggcggaagctcaaagtttatgctgttgaaaagaatccaaatgctgttgttaccctacatgcattagtcaagttagaaggatgggaggatactgtgaccatagtctcaagtgacatgcgtcattggagtgcccctgaaaaagctgacatattggttagtgaattgctaggttcttttggcgacaatgagctgtctcctgagtgccttgatggagcccagagatttctaaagcaagatggaatttcaataccatcttcgtacacaagtttcctccaaccagtgacagcttcaaagttatataatgatgttaaggcacataaagatcttgtacactttgaaactgcttatgttgtcaaaatgcacaatgtagccaaacttgcaccaacccaacctgtttttacatttactcatccaaagcactctgataaagaaatcaatcagcgctataaaaagttgaattttataatacctaatgacactgggtcagcaatggtacacggatttgctggttattttgatgcaactctttacaaggatgtgcatcttggaattgaaccttcaactgcaacaccaaacatgttcagttggtttgcaatatttttcccattaaggacacccatttgtgtggatcccggttctacacttgaagtacatttttggcgttgttgtggttctacgaaggtttggtatgagtggtgtgttgcttctcccgcgtcgtccccaatgcacaacagtaatggacgttcatactgggttgggctttag

SEQ ID NO: 1050 - protein, 643 aa, Glycine max
MPLGERAGDKSESRYCGVETDFNDDMPHVLHFNLYSGSFDFVVAPLMDHSYRPSLVQKDALGSGVLPFAGSDLVLSPSQWSSHVVGKISSWIDLDSEDETLRIDSETTLKQEIAWASHLSLQACLLPAPKGTSCANYARCVNQILQGSNNMQLWLRVPLVKPDDDSMDAKSVALVDSWETWNSFRLLCEHHSQLSVALDILSTLPSPNSLGRWFGEPVRAAILHTDCFLTNSHGCPCLSKRHQSLITGFFNHSIQIIVSANSVHPKASVDANDNSDTNSQKHPLRPYLDYIGYLYQRMDPLPEQERFELGYRDFLQSPLQPLMDNLEAQTYETFERDAVKYIQYQRAVSKALLDRVPDEEASVKTIVLMVVGAGRGPLVRASLQAAEETGRKLKVYAVEKNPNAVVTLHALVKLEGWEDTVTIVSSDMRHWSAPEKADILVSELLGSFGDNELSPECLDGAQRFLKQDGISIPSSYTSFLQPVTASKLYNDVKAHKDLVHFETAYVVKMHNVAKLAPTQPVFTFTHPKHSDKEINQRYKKLNFIIPNDTGSAMVHGFAGYFDATLYKDVHLGIEPSTATPNMFSWFAIFFPLRTPICVDPGSTLEVHFWRCCGSTKVWYEWCVASPASSPMHNSNGRSYWVGL

SEQ ID NO: 1051 - DNA, 1932 bp, Glycine max
  CDS (1)..(1932)
atgcctctgggagaaaggtcaggggataagagcgagtctcgctactgcggcgtagagaccgacttcaacgatgacatggcgcacgtcctccatttcaacctttattctggaagcttcgatttcgttgttgctcctctgatggatccttcttataggccaagtttagttcaaaatgatgctttggggtctggtcttctgccatttgctgggtcagacttggtcttgagtccatcccaatggagcagtcatgtagtgggaaaaattagctcatggatagatttggattcagaggatgaaaccctcagggtagattctgaaaccactcttagacaagaaattgcttgggcttctcatctctctttacaggcctgccttcttcctgcccccaagggaacttcttgtgctaattatgctagatgtgtgaatcagattttacagggttcaaataatatgcagttgtggcttaggcttccattggtgaagcctgatgatgactctatggatgcaaagtctgttgctttggttgactactgggaaacttggaattcatttcgtctgctgtgtgagcatcatagtcaactgtcagttgcacttgatattctgagtactctcccttccccaaattcactaggacgttggtttggggagcctcttagagcagctatattacatactgattgctttctaactaattctcatggctctccatgcctctccaagcgtcaccagagtttaattactggtgtttttaatcattctattcagatcattatatctggaaattcagttcatacaaaagcaagtatggatgcaaatgataattctggtacagattcacaaagacatcccttgcggccatatctggactacgttggatatctttaccaaagaatggatcctcttcctgagcaagaacgttttgagcttggttacagggattttttacagtcacccttgcaacctttgatggataatttagaggctcagacttacgagacttttgagagagatgcaatgaaatacattcagtaccaaagagcagttagtaaagcattgctggacagggttcctgatgaagaggcatctgttaaaaccattgtattgatggttgtgggggcagggcgtgggcctcttgtgcgggcttcattacaggctgctgaagaaactgggcggaagctcaaagtttatgctgttgaaaagaatccgaatgctgttgttaccctacatgcattagtcaagttagaaggatgggagtatactgtgaccatagtctcaagtgacatgcgtcattggaatgcccctgaaaaagctgacatattggttagtgaattgctaggttcttttggtgacaacgaactgtctcctgagtgccttgatggagcccagagatttctaaagcaagatggaatttcaataccatcttcgtacacaagtttcctccaaccagtgacagcttcaaagttatataatgatgttaaggctcataaagaccttgtacactttgaaactgcttatgttgtgaaaatgcacaatgtagccagacttgcaccaacccaacctgtttttacatttactcatccaaagcactctgatacagaaagcaatcagcgccataaaaagttgaattttgtgatacctaatgacactgggtcagcaatggtacacggatttgctggttattttgatgcaactctttacaaggatgtgcatcttggaattgaaccttcaacggcaacaccaaacatgttcagttggtttgcaatatttttcccattaaggacacccatttgtgtggatcccggttctacacttgaagtacatttttggcgttgttgtggttctacaaaggtttggtatgagtggtgtgttgcctctccctcgtcgtccccaattcacaacagtaatggacgttcatactgggttgggctttag

SEQ ID NO: 1052 - protein, 643 aa, Glycine max
MPLGERSGDKSESRYCGVETDFNDDMAHVLHFNLYSGSFDFVVAPLMDPSYRPSLVQNDALGSGLLPFAGSDLVLSPSQWSSHVVGKISSWIDLDSEDETLRVDSETTLRQEIAWASHLSLQACLLPAPKGTSCANYARCVNQILQGSNNMQLWLRLPLVKPDDDSMDAKSVALVDYWETWNSFRLLCEHHSQLSVALDILSTLPSPNSLGRWFGEPLRAAILHTDCFLTNSHGSPCLSKRHQSLITGVFNHSIQIIISGNSVHTKASMDANDNSGTDSQRHPLRPYLDYVGYLYQRMDPLPEQERFELGYRDFLQSPLQPLMDNLEAQTYETFERDAMKYIQYQRAVSKALLDRVPDEEASVKTIVLMVVGAGRGPLVRASLQAAEETGRKLKVYAVEKNPNAVVTLHALVKLEGWEYTVTIVSSDMRHWNAPEKADILVSELLGSFGDNELSPECLDGAQRFLKQDGISIPSSYTSFLQPVTASKLYNDVKAHKDLVHFETAYVVKMHNVARLAPTQPVFTFTHPKHSDTESNQRHKKLNFVIPNDTGSAMVHGFAGYFDATLYKDVHLGIEPSTATPNMFSWFAIFFPLRTPICVDPGSTLEVHFWRCCGSTKVWYEWCVASPSSSPIHNSNGRSYWVGL

SEQ ID NO: 1053 - DNA, 1932 bp, Glycine max
  CDS (1)..(1932)
atgcctctgggagaaagagcaggggataagagcgagtctcgctactgcggtgtagagaccgacttcaacgatgacatgccacacgtcctccatttcaacctttattctggaagcttcgatttcgttgttgctcctctgatggatcattcttatcggccaagtttagtgcaaaaggatgctttggggtctggtgttctgccatttgctgggtcagacttggtcttgagtccatcccagtggagtagtcatgtagtgggaaaaattagctcatggatagatttggattcagaggatgaaaccctcaggatagattctgaaaccactcttaaacaagaaattgcttgggcttctcatctctctttacaggcctgcctgcttcctgccccgaagggaacttcttgtgctaattatgctagatgtgtgaatcagatcttacagggttcaaataatatgcagttgtggcttagggttccattggtgaagcctgatgatgactctatggatgcaaagtctgttgctttggttgactcttgggaaacttggaattcatttcgtctgctgtgtgagcatcatagtcaactgtcagttgcacttgatattctgagtactcttccttccccaaattcactaggacgctggtttggggagcctgttagagcagctatattacatactgattgctttctaactaattctcatggctgtccatgcctctccaagcgccaccagagtttaattactggtttttttaaccattctattcagatcattgtatctggaaattcagttcatccaaaagcaagtgtggatgcaaatgataattctggtacaaattcacaaaggcatcccttgcggccatatctggactacattggatatctttaccaaagaatggatcctcttcctgagcaagaacgttttgagcttggttacagggattttttacagtcacccttgcaacctttgatggataatttagaggctcagacttacgagacttttgagagagatgcagtgaaatacattcagtaccaacgagcagtcagtaaagcattgctggacagggttcctgatgaagaggcatctgttaaaaccattgtattgatggttgtgggggcaggacgtgggcctcttgtgcgggcatcattacaggctgctgaagaaactgggcggaagctcaaagtttatgctgttgaaaagaatccaaatgctgttgttaccctacatgcattagtcaagttagaaggatgggaggatactgtgaccatagtctcaagtgacatgcgtcattggagtgcccctgaaaaagctgacatattggttagtgaattgctaggttcttttggcgacaatgagctgtctcctgagtgccttgatggagcccagagatttctaaagcaagatggaatttcaataccatcttcgtacacaagtttcctccaaccagtgacagcttcaaagttatataatgatgttaaggcacataaagatcttgtacactttgaaactgcttatgttgtcaaaatgcacaatgtagccaaacttgcaccaacccaacctgtttttacatttactcatccaaagcactctgataaagaaatcaatcagcgctataaaaagttgaattttataatacctaatgacactgggtcagcaatggtacacggatttgctggttattttgatgcaactctttacaaggatgtgcatcttggaattgaaccttcaactgcaacaccaaacatgttcagttggtttgcaatatttttcccattaaggacacccatttgtgtggatcccggttctacacttgaagtacatttttggcgttgttgtggttctacgaaggtttggtatgagtggtgtgttgcttctcccgcgtcgtccccaatgcacaacagtaatggacgttcatactgggttgggctttag

SEQ ID NO: 1054 - protein, 643 aa, Glycine max; identical to SEQ ID NO: 1046

SEQ ID NO: 1055 - DNA, 1962 bp, Zea mays
  CDS (1)..(1962)
atgccgctggggcagcgttcgggggacaagagcgactcccgctactgcggggtggaggttctcgacttccccgccggggagggcctccctgccgtcctcaatcactccctcgcctccgccttcgacttcatcctcgcccctctggttgatcccaactaccggccggcgcccggcgccgttctgccagtgtcagcgtcagacctcgtcctcggcccgtcccagtggagcaaccacgtcgtcgggaagatcagcgagtggatcgatttggacgcggaggacgagcggctccgcctgcactccaagctcacgctgaagcaggagatcgcttgggcatctcacgtctcgctgcaggcatgtgttattcctgcccccaggagatctttttgcggcaattatgccagagtcgtgaatcaaattttgcaaggcctgaccaatatgaatttgtggctcaggttgcctctggagaagtccgagcctatggatgatgatcttgataaaataaagaacaacaaccacacgctacagagtgaaattgtagactcatgggaattatggaattcattcagattgctatgtgaccatagtagccaactatgtgtggcactcgatattttgagcactctgccatcaataaactcattagcaaggtggtttggagagcctgtaagggctgctattctgcaaaccgaggcttttcttacaaatgcaaaaggatatccttgtttatcaaagcgccatcagagtctgctaactggattttttaaacattctgttcaggtgataatatctggaagatcaaatcacaatgttttcccagtatctgaaggagtgctctcaggtgatgagagctacacagaagattcccatgttcgacatgcattaactccttaccttgaatacattgcgtacctatatcggaagatggatccgcttcctgagcaggaacgcattgagattaattacagggactttttgcagtctcctctccagcctctaatggataatttggaagctcagacttacgagacttttgagaaggatgttgtgaagtatactcagtatcgaagagcagttgctaaggccttggttgatagggttgcagatgatgcagtctccacaactaggacggttctgatggttgtgggagcaggccgagggcctctagtacgagcatcattgcaggctgctgaagaaactggtcgcaagttaaaagtatatgctgttgaaaaaaatcctaacgctgttattactcttcatagtttgatcaaattggagggttgggaaagcctggttactgtaatttctagtgacatgcggtgttgggatgcccctgaaaagacagagattttggtaagtgaattgcttgggtcctttggggacaaagaactatctccggagtgtctggatggtgcacaaagatacctgaagcctgatgcgatttccactccttcatcatacaccagcttcacccaaccaataacagaatcaaaattgcacgacgacatcaaagcacacaaagatattgcacattttgaaacggcatatgttgtgaaactacaccgcatagcgacacttgcacctccacaacaggtttttactttcacccatccaaatttctcaccaaatgccagcaaccaaaggtacaccaagttgcaatttgaaatgctgccagacatgggttcatgccttgtgcacggatttgctggctattttgactctgttctttataaggatgttcatcttggaatcgagccaaacaccgctacaccaaacatgttcagctggttcccgatcttcttcccattgagaaagcccatctacgtgcccgaagggtctcctatagaagtgcacttctggcggtgctgtgcccccacgaaggtgtggtacgagtgggctgtgactacgccgaccccgtcgccgatccacaacagcaatggccggtcctattgggttggtctataa

SEQ ID NO: 1056 - protein, 653 aa, Zea mays
MPLGQRSGDKSDSRYCGVEVLDFPAGEGLPAVLNHSLASAFDFILAPLVDPNYRPAPGAVLPVSASDLVLGPSQWSNHVVGKISEWIDLDAEDERLRLHSKLTLKQEIAWASHVSLQACVIPAPRRSFCGNYARVVNQILQGLTNMNLWLRLPLEKSEPMDDDLDKIKNNNHTLQSEIVDSWELWNSFRLLCDHSSQLCVALDILSTLPSINSLARWFGEPVRAAILQTEAFLTNAKGYPCLSKRHQSLLTGFFKHSVQVIISGRSNHNVFPVSEGVLSGDESYTEDSHVRHALTPYLEYIAYLYRKMDPLPEQERIEINYRDFLQSPLQPLMDNLEAQTYETFEKDVVKYTQYRRAVAKALVDRVADDAVSTTRTVLMVVGAGRGPLVRASLQAAEETGRKLKVYAVEKNPNAVITLHSLIKLEGWESLVTVISSDMRCWDAPEKTEILVSELLGSFGDKELSPECLDGAQRYLKPDAISTPSSYTSFTQPITESKLHDDIKAHKDIAHFETAYVVKLHRIATLAPPQQVFTFTHPNFSPNASNQRYTKLQFEMLPDMGSCLVHGFAGYFDSVLYKDVHLGIEPNTATPNMFSWFPIFFPLRKPIYVPEGSPIEVHFWRCCAPTKVWYEWAVTTPTPSPIHNSNGRSYWVGL

SEQ ID NO: 1057 - DNA, 1956 bp, Zea mays
  CDS (1)..(1956)
atgccgctggggcagcgtccgggggacaagagtgacgcccgctactgcggggcggaggtgctcgacttccctgccggcgaggacctccccgccgtcctcaaccactccctcgcctccgccttcgacttcatcctcgtccctctggttgatcccaactaccggccggcgcccggctccgttctgcccgtgtcggcgtcggacctcatccttggcccggcccagtggagcaaccacgtcgtcgggaagatcagcgagtggattgatttggactctgaggacgagcggctccgctttgactccgagctcacgctgaagcaggagattgcgtgggcgtctcacgtctcgctgcaggcatgtggtcttcctgcccccaagagatctttttggggcaattatgccagagtcgtgaatcaaattttgcaaggcctgaccaatatgcatttgtggctcaggttgcctctggagaagtccgagcctatggatgatgatcttgataaaataaagaataacagccacacgagtgaaattgtagactcatgggaattatggaattcattcagattgctatgtgaccatagtagccaactatgtgtggcactcgatattttgagcactctgccatcaataaactcattagcaaggtggtttggagagcctgtaagggctgctattctgcaaaccgaggcttttcttacaaatgcaaaaggatatccttgtttatcaaagcgccatcagagtctgctaactggattttttaaacattctgttcaggtgataatatctggaagatcaaatcacaatgttttcccagtatctgaaggagtgctctcaggtgatgagagctacacagaagattcccatgttcgacatgcattaactccttaccttgaatacattgcgtacctatatcggaagatggatccgcttcctgagcaggaacgcattgagattaattacagggactttttgcagtctcctctgcagcctctaatggacaatttggaagctcaaacttatgagacatttgagaaggatgttgtgaagtacactcagtatcgaagagcagttgctaaggccttggttgatagggttgctgatgatgcagtctctacaactaggacggtgctgatggttgtgggagcaggacggggacctctagtacgagcatcattgcaggccgctgaagaaactggtcgcaaattaaaagtatatgctgttgaaaaaaatcctaacgctgttattactcttcatagtttgatcaaattggagggttgggaaagcctggttactgtaatttctagtgacatgcggtgttgggacgcccctgaaaaggcagatgttttggtcagtgaattgcttgggtcctttggtgacaatgaactatctcctgagtgtcttgatggtgctcagagattcttgaagcctgatgggatttccattccttcatcatacaccagtttcatccaaccaataatagcatcaaaattgcacaacgatatcaaagcacacaaagacattgcacattttgaaaccgcatatgttgtcaaactacaccgcatagcgacacttgcacctccacaacaggtttttactttcacccatccaaatttctcaccaaatgctagcaaccaaaggtacaccaagttgcaatttgaaatgctgccagatatgggttcatgccttgtgcatggatttgctggctattttgactctgtactttataaagatgttcatcttggaatcgagccaaacacagctacaccaaacatgtttagctggttccccatcttcttcccattgagaaaacccatctacgtgccggaagggtctcctatagaagtgcacttctggcggtgctgtgcccccacaaaggtgtggtacgagtgggctgtgactacaccgaccccgtcgccgatccacaacagcaatggccggtcctattgggttggtctatag

SEQ ID NO: 1058 - protein, 651 aa, Zea mays
MPLGQRPGDKSDARYCGAEVLDFPAGEDLPAVLNHSLASAFDFILVPLVDPNYRPAPGSVLPVSASDLILGPAQWSNHVVGKISEWIDLDSEDERLRFDSELTLKQEIAWASHVSLQACGLPAPKRSFWGNYARVVNQILQGLTNMHLWLRLPLEKSEPMDDDLDKIKNNSHTSEIVDSWELWNSFRLLCDHSSQLCVALDILSTLPSINSLARWFGEPVRAAILQTEAFLTNAKGYPCLSKRHQSLLTGFFKHSVQVIISGRSNHNVFPVSEGVLSGDESYTEDSHVRHALTPYLEYIAYLYRKMDPLPEQERIEINYRDFLQSPLQPLMDNLEAQTYETFEKDVVKYTQYRRAVAKALVDRVADDAVSTTRTVLMVVGAGRGPLVRASLQAAEETGRKLKVYAVEKNPNAVITLHSLIKLEGWESLVTVISSDMRCWDAPEKADVLVSELLGSFGDNELSPECLDGAQRFLKPDGISIPSSYTSFIQPIIASKLHNDIKAHKDIAHFETAYVVKLHRIATLAPPQQVFTFTHPNFSPNASNQRYTKLQFEMLPDMGSCLVHGFAGYFDSVLYKDVHLGIEPNTATPNMFSWFPIFFPLRKPIYVPEGSPIEVHFWRCCAPTKVWYEWAVTTPTPSPIHNSNGRSYWVGL

SEQ ID NO: 1059 - DNA, 1962 bp, Zea mays
  CDS (1)..(1962)
atgccgctggggcagcgttcgggggacaagagcgactcccgctactgcggggtggaggttctcgacttccccgccggggagggcctccctgccgtcctcaatcactccctcgcctccgccttcgacttcatcctcgcccctctggttgatcccaactaccggccggcgcccggcgccgttctgccagtgtcagcgtcggacctcgtcctcggcccgtcccagtggagcaaccacgtcgtcgggaagatcagcgagtggattgatttggacgcggaggacgagcggctccggctggactccgagctcacgctgaagcaggagatcgcttgggcatctcacgtttcgctgcaggcatgtgttattcctgcccccaggagatctttttgcggcaattatgccagagttgtgaatcaaattttgcaaggcctgaccaatatgaatttgtggcttaggttgcctctggagaagtccgagcctatggatggtgatcttgataaaataaagaacaacaaccacacgctacagagtgaaatagcagactcatgggaattatggaattcattcagattgctatgtgaccatagtagccaactatgcgtggcacttgatatttcgggcacactgccatcaatgaactcattagggcgctggtttggggagcctgtaagggctgctattctgcaaaccaatgcttttcttacaaatgcaagaggatatccttgtttatcaaagcggcatcagaggctgctaactggactttttaatcattctgttcaggcgataatctctgggagatcgaatcacaatgtttttccagcatctgaaggagtgctctcaggcgatgagggcaacgctgaagattcctatgttcgacatgcattagctccgtacctggagtacattgcatacctgtatcagaagatggatccgcttcctgagcaggaacgctttgagattaattacagggattttttgcagtctcctctccagcctctaatggataatttggaagctcagacttacgagacttttgagaaggatgttgtgaagtatactcagtatcgaagagcagttgctaaggccttggttgatagggttgcagatgatgcagtctccacaactaggacggttctgatggttgtgggagcaggccgaggacctctagtaagagcatcattgcaggctgctgaagaaactggtcgcaagttaaaagtatatgctgttgaaaaaaatcctaacgctgttattactcttcatagtttgatcaaattggagggttgggaaagcctggttactgtaatttctagtgacatgcggtgttgggatgcccctgaaaaggcagatattttggtcagcgaattgcttgggtcctttggggacaatgaactatctccggaatgtctggatggtgctcaacgattcttgaagcctgatgggatttccattccttcatcatacaccagcttcatccaaccaataacagcgtcaaaattgcacgacgacatcaaagcacacaaagatattgcacattttgaaacggcatatgttgtgaaactacaccgcatagcgacacttgcacctccacaacaggtttttactttcacccatccaaatttctcaccaaatgccagcaaccaaaggtacaccaagttgcaatttgaaatgctgccagacatgggttcatgccttgtgcacggatttgctggctattttgactctgttctttataaggatgctcatcttggaatcgagccaaacaccgctacaccaaacatgttcagctggttcccgatcttcttcccattgagaaagcccatctacgtgcccgaagggtctcctatagaaatgcacttctggcggtgctgtgcccccacgaaggtgtggtacgagtgggctgtgactacgccgaccccgtcgccgatccacaacagcaatggccggtcctattgggttggtctatag

SEQ ID NO: 1060 - protein, 653 aa, Zea mays
MPLGQRSGDKSDSRYCGVEVLDFPAGEGLPAVLNHSLASAFDFILAPLVDPNYRPAPGAVLPVSASDLVLGPSQWSNHVVGKISEWIDLDAEDERLRLDSELTLKQEIAWASHVSLQACVIPAPRRSFCGNYARVVNQILQGLTNMNLWLRLPLEKSEPMDGDLDKIKNNNHTLQSEIADSWELWNSFRLLCDHSSQLCVALDISGTLPSMNSLGRWFGEPVRAAILQTNAFLTNARGYPCLSKRHQRLLTGLFNHSVQAIISGRSNHNVFPASEGVLSGDEGNAEDSYVRHALAPYLEYIAYLYQKMDPLPEQERFEINYRDFLQSPLQPLMDNLEAQTYETFEKDVVKYTQYRRAVAKALVDRVADDAVSTTRTVLMVVGAGRGPLVRASLQAAEETGRKLKVYAVEKNPNAVITLHSLIKLEGWESLVTVISSDMRCWDAPEKADILVSELLGSFGDNELSPECLDGAQRFLKPDGISIPSSYTSFIQPITASKLHDDIKAHKDIAHFETAYVVKLHRIATLAPPQQVFTFTHPNFSPNASNQRYTKLQFEMLPDMGSCLVHGFAGYFDSVLYKDAHLGIEPNTATPNMFSWFPIFFPLRKPIYVPEGSPIEMHFWRCCAPTKVWYEWAVTTPTPSPIHNSNGRSYWVGL

SEQ ID NO: 1061 - DNA, 28 bp, Artificial sequence
  primer
atagagctccggcgttgagactgatttc

SEQ ID NO: 1062 - DNA, 30 bp, Artificial sequence
  primer
atacccggggcccaagctatttcttgcttc

SEQ ID NO: 1063 - DNA, 20 bp, Artificial sequence
  primer
atgccgctcggagagagagg

SEQ ID NO: 1064 - DNA, 20 bp, Artificial sequence
  primer
ctaaaggccaacccagtacg

SEQ ID NO: 1065 - DNA, 28 bp, Artificial sequence
  primer
ataccatggcggcgttgagactgatttc

SEQ ID NO: 1066 - DNA, 32 bp, Artificial sequence
  primer
atattaattaagcccaagctatttcttgcttc

SEQ ID NO: 1067 - DNA, 28 bp, Artificial sequence
  primer
ataggtacccggcgttgagactgatttc

SEQ ID NO: 1068 - DNA, 30 bp, Artificial sequence
  primer
atagtcgacgcccaagctatttcttgcttc

SEQ ID NO: 1069 - protein, 662 aa, Artificial sequence
  consensus sequence
  Variant (5)..(5): Xaa in position 5 is any amino acid
  Variant (7)..(7): Xaa in position 7 is any amino acid
  Variant (9)..(13): Xaa in position 9 to 13 is any amino acid
  Variant (14)..(14): Xaa in position 14 is any or no amino acid
  Variant (19)..(19): Xaa in position 19 is any amino acid
  Variant (21)..(21): Xaa in position 21 is any amino acid
  Variant (22)..(22): Xaa in position 22 is any or no amino acid
  Variant (25)..(31): Xaa in position 25 to 31 is any amino acid
  Variant (32)..(33): Xaa in position 32 to 33 is any or no amino acid
  Variant (35)..(41): Xaa in position 35 to 41 is any amino acid
  Variant (42)..(42): Xaa in position 42 is any or no amino acid
  Variant (45)..(48): Xaa in position 45 to 48 is any amino acid
  Variant (51)..(51): Xaa in position 51 is any amino acid
  Variant (54)..(54): Xaa in position 54 is any amino acid
  Variant (58)..(61): Xaa in position 58 to 61 is any amino acid
  Variant (62)..(68): Xaa in position 62 to 68 is any or no amino acid
  Variant (72)..(74): Xaa in position 72 to 74 is any amino acid
  Variant (78)..(78): Xaa in position 78 is any amino acid
  Variant (80)..(80): Xaa in position 80 is any amino acid
  Variant (82)..(82): Xaa in position 82 is any amino acid
  Variant (86)..(86): Xaa in position 86 is any amino acid
  Variant (94)..(94): Xaa in position 94 is any amino acid
  Variant (100)..(100): Xaa in position 100 is any amino acid
  Variant (104)..(104): Xaa in position 104 is any amino acid
  Variant (107)..(107): Xaa in position 107 is any amino acid
  Variant (111)..(111): Xaa in position 111 is any amino acid
  Variant (121)..(121): Xaa in position 121 is any amino acid
  Variant (123)..(123): Xaa in position 123 is any amino acid
  Variant (129)..(130): Xaa in position 129 to 130 is any amino acid
  Variant (132)..(132): Xaa in position 132 is any amino acid
  Variant (134)..(137): Xaa in position 134 to 137 is any amino acid
  Variant (139)..(139): Xaa in position 139 is any amino acid
  Variant (144)..(144): Xaa in position 144 is any amino acid
  Variant (152)..(156): Xaa in position 152 to 156 is any amino acid
  Variant (161)..(161): Xaa in position 161 is any amino acid
  Variant (164)..(164): Xaa in position 164 is any amino acid
  Variant (166)..(171): Xaa in position 166 to 171 is any amino acid
  Variant (172)..(173): Xaa in position 172 to 173 is any or no amino acid
  Variant (175)..(181): Xaa in position 175 to 181 is any amino acid
  Variant (182)..(190): Xaa in position 182 to 190 is any or no amino acid
  Variant (193)..(193): Xaa in position 193 is any amino acid
  Variant (202)..(202): Xaa in position 202 is any amino acid
  Variant (204)..(204): Xaa in position 204 is any amino acid
  Variant (206)..(206): Xaa in position 206 is any amino acid
  Variant (208)..(208): Xaa in position 208 is any amino acid
  Variant (213)..(213): Xaa in position 213 is any amino acid
  Variant (220)..(221): Xaa in position 220 to 221 is any amino acid
  Variant (224)..(224): Xaa in position 224 is any amino acid
  Variant (227)..(227): Xaa in position 227 is any amino acid
  Variant (230)..(230): Xaa in position 230 is any amino acid
  Variant (237)..(237): Xaa in position 237 is any amino acid
  Variant (239)..(239): Xaa in position 239 is any amino acid
  Variant (240)..(240): Xaa in position 240 is any or no amino acid
  Variant (245)..(246): Xaa in position 245 to 246 is any amino acid
  Variant (248)..(248): Xaa in position 248 is any amino acid
  Variant (257)..(257): Xaa in position 257 is any amino acid
  Variant (259)..(260): Xaa in position 259 to 260 is any amino acid
  Variant (264)..(264): Xaa in position 264 is any amino acid
  Variant (266)..(267): Xaa in position 266 to 267 is any amino acid
  Variant (269)..(270): Xaa in position 269 to 270 is any amino acid
  Variant (274)..(276): Xaa in position 274 to 276 is any amino acid
  Variant (278)..(285): Xaa in position 278 to 285 is any amino acid
  Variant (286)..(287): Xaa in position 286 to 287 is any or no amino acid
  Variant (289)..(296): Xaa in position 289 to 296 is any amino acid
  Variant (297)..(302): Xaa in position 297 to 302 is any or no amino acid
  Variant (304)..(305): Xaa in position 304 to 305 is any amino acid
  Variant (308)..(308): Xaa in position 308 is any amino acid
  Variant (310)..(311): Xaa in position 310 to 311 is any amino acid
  Variant (314)..(316): Xaa in position 314 to 316 is any amino acid
  Variant (318)..(319): Xaa in position 318 to 319 is any amino acid
  Variant (326)..(326): Xaa in position 326 is any amino acid
  Variant (328)..(329): Xaa in position 328 to 329 is any amino acid
  Variant (336)..(336): Xaa in position 336 is any amino acid
  Variant (355)..(355): Xaa in position 355 is any amino acid
  Variant (357)..(357): Xaa in position 357 is any amino acid
  Variant (361)..(361): Xaa in position 361 is any amino acid
  Variant (364)..(364): Xaa in position 364 is any amino acid
  Variant (368)..(368): Xaa in position 368 is any amino acid
  Variant (372)..(372): Xaa in position 372 is any amino acid
  Variant (376)..(376): Xaa in position 376 is any amino acid
  Variant (378)..(380): Xaa in position 378 to 380 is any amino acid
  Variant (382)..(385): Xaa in position 382 to 385 is any amino acid
  Variant (409)..(409): Xaa in position 409 is any amino acid
  Variant (425)..(425): Xaa in position 425 is any amino acid
  Variant (429)..(429): Xaa in position 429 is any amino acid
  Variant (431)..(431): Xaa in position 431 is any amino acid
  Variant (433)..(433): Xaa in position 433 is any amino acid
  Variant (438)..(439): Xaa in position 438 to 439 is any amino acid
  Variant (442)..(443): Xaa in position 442 to 443 is any amino acid
  Variant (445)..(445): Xaa in position 445 is any amino acid
  Variant (449)..(449): Xaa in position 449 is any amino acid
  Variant (451)..(451): Xaa in position 451 is any amino acid
  Variant (455)..(455): Xaa in position 455 is any amino acid
  Variant (458)..(458): Xaa in position 458 is any amino acid
  Variant (486)..(486): Xaa in position 486 is any amino acid
  Variant (499)..(499): Xaa in position 499 is any amino acid
  Variant (502)..(502): Xaa in position 502 is any amino acid
  Variant (508)..(508): Xaa in position 508 is any amino acid
  Variant (511)..(511): Xaa in position 511 is any amino acid
  Variant (517)..(518): Xaa in position 517 to 518 is any amino acid
  Variant (528)..(528): Xaa in position 528 is any amino acid
  Variant (530)..(531): Xaa in position 530 to 531 is any amino acid
  Variant (533)..(533): Xaa in position 533 is any amino acid
  Variant (537)..(537): Xaa in position 537 is any amino acid
  Variant (539)..(539): Xaa in position 539 is any amino acid
  Variant (544)..(544): Xaa in position 544 is any amino acid
  Variant (547)..(548): Xaa in position 547 to 548 is any amino acid
  Variant (550)..(553): Xaa in position 550 to 553 is any amino acid
  Variant (558)..(558): Xaa in position 558 is any amino acid
  Variant (561)..(561): Xaa in position 561 is any amino acid
  Variant (563)..(566): Xaa in position 563 to 566 is any amino acid
  Variant (568)..(568): Xaa in position 568 is any amino acid
  Variant (571)..(572): Xaa in position 571 to 572 is any amino acid
  Variant (582)..(583): Xaa in position 582 to 583 is any amino acid
  Variant (595)..(595): Xaa in position 595 is any amino acid
  Variant (606)..(606): Xaa in position 606 is any amino acid
  Variant (613)..(613): Xaa in position 613 is any amino acid
  Variant (615)..(616): Xaa in position 615 to 616 is any amino acid
  Variant (618)..(623): Xaa in position 618 to 623 is any amino acid
  Variant (632)..(634): Xaa in position 632 to 634 is any amino acid
  Variant (641)..(644): Xaa in position 641 to 644 is any amino acid
  Variant (646)..(647): Xaa in position 646 to 647 is any amino acid
  Variant (650)..(650): Xaa in position 650 is any amino acid
  Variant (653)..(653): Xaa in position 653 is any amino acid
MPLGXRXGXXXXXXRYCGXEXXDFXXXXXXXXXLXXXXXXXXFDXXXXPLXDPXYRPXXXXXXXXXXXVLPXXXSDLXLXPXQWSXHVVGKISXWIDLDXEDEXLRXDSEXTLKQEIAWAXHXSLQACXXPXPXXXXCXNYARXVNQILQGXXXXXLWLRXPLXKXXXXXXXXDXXXXXXXXXXXXXXXXWEXWNSFRLLCXHXSXLXVALDXLSTLPSXXSLXRWXGEXVRAAILXTXXFLTNXXGXPCLSKRHQXLXXGFFXHXXQXXISGXXXHXXXXXXXXXXSXXXXXXXXXXXXXXLXXYLXYXXYLXXXMXXLPEQERXEXXYRDFLQXPLQPLMDNLEAQTYETFEXDXVKYXQYXRAVXKALXDRVXDXXXSXXXXVLMVVGAGRGPLVRASLQAAEETXRKLKVYAVEKNPNAVXTLHXLXKXEGWEXXVTXXSXDMRXWXAPEXADXLVSELLGSFGDNELSPECLDGAQRFLKXDGISIPSSYTSFXQPXTASKLXNDXKAHKDXXHFETAYVVKXHXXAXLAPXQXVFTFXHPXXSXXXXNQRYXKLXFXXXXDXGSXXVHGFAGYFDXXLYKDVHLGIEPXTATPNMFSWFXIFFPLRXPXXVXXXXXXEVHFWRCCXXXKVWYEWXXXXPXXSPXHNXNGRSYWVGL

SEQ ID NO: 1070 - protein, 55 aa, Artificial sequence
  protein pattern
  Variant (4)..(4): Xaa in position 4 is any amino acid
  Variant (7)..(7): Xaa in position 7 is Ile or Val
  Variant (35)..(35): Xaa in position 35 is Pro or Gln
  Variant (48)..(48): Xaa in position 48 is Ile or Leu
  Variant (49)..(49): Xaa in position 49 is Glu or Gln
  Variant (51)..(51): Xaa in position 51 is Ile or Val
  Variant (52)..(52): Xaa in position 52 is any amino acid
APEXADXLVSELLGSFGDNELSPECLDGAQRFLKXDGISIPSSYTSFXXPXXASK

SEQ ID NO: 1071 - protein, 60 aa, Artificial sequence
  protein pattern
  Variant (6)..(6): Xaa in position 6 is Glu or Ser
  Variant (12)..(12): Xaa in position 12 is Ala or Ser
  Variant (16)..(16): Xaa in position 16 is any amino acid
  Variant (19)..(19): Xaa in position 19 is Phe, Ile, Leu or Met
  Variant (23)..(23): Xaa in position 23 is any amino acid
  Variant (33)..(33): Xaa in position 33 is Ser or Thr
  Variant (35)..(35): Xaa in position 35 is Leu or Val
  Variant (41)..(41): Xaa in position 41 is Gly, Leu or Val
  Variant (42)..(42): Xaa in position 42 is Ile or Leu
  Variant (44)..(44): Xaa in position 44 is Ala, Pro or Thr
  Variant (46)..(46): Xaa in position 46 is Lys or Arg
  Variant (47)..(50): Xaa in position 47 to 50 is any amino acid
  Variant (51)..(51): Xaa in position 51 is Ala or Gly
  Variant (56)..(56): Xaa in position 56 is Cys or Val
  Variant (59)..(59): Xaa in position 59 is any amino acid
VGKISXWIDLDXEDEXLRXDSEXTLKQEIAWAXHXSLQACXXPXPXXXXXXNYARXVNXI

SEQ ID NO: 1072 - protein, 61 aa, Artificial sequence
  protein pattern
  Variant (23)..(23): Xaa in position 23 is Asp or Gly
  Variant (39)..(39): Xaa in position 39 is Ile or Val
  Variant (43)..(43): Xaa in position 43 is Ala, Asn or Ser
  Variant (45)..(45): Xaa in position 45 is Ile or Val
  Variant (47)..(47): Xaa in position 47 is Leu or Met
  Variant (52)..(53): Xaa in position 52 to 53 is any amino acid
  Variant (56)..(56): Xaa in position 56 is any or no amino acid
  Variant (58)..(58): Xaa in position 58 is any or no amino acid
  Variant (60)..(60): Xaa in position 60 is Cys or Ser
LMVVGAGRGPLVRASLQAAEETXRKLKVYAVEKNPNAVXTLHXLXKXEGWEXXVTXIXSXD

SEQ ID NO: 1073 - protein, 36 aa, Artificial sequence
  protein pattern
  Variant (3)..(3): Xaa in position 3 is Ala or Ser
  Variant (4)..(4): Xaa in position 4 is His, Lys or Arg
  Variant (6)..(6): Xaa in position 6 is any amino acid
  Variant (15)..(15): Xaa in position 15 is any amino acid
  Variant (17)..(17): Xaa in position 17 is Ile or Leu
  Variant (18)..(18): Xaa in position 18 is Ala or Thr
  Variant (22)..(22): Xaa in position 22 is any amino acid
  Variant (24)..(24): Xaa in position 24 is Ala or Ser
  Variant (25)..(25): Xaa in position 25 is Ala, Ile or Val
  Variant (27)..(29): Xaa in position 27 to 29 is Ile or Val
  Variant (30)..(30): Xaa in position 30 is Cys or Ser
  Variant (31)..(31): Xaa in position 31 is Ala or Gly
  Variant (32)..(32): Xaa in position 32 is any amino acid
  Variant (33)..(33): Xaa in position 33 is Pro or Ser
  Variant (34)..(34): Xaa in position 34 is Asn or Val
  Variant (36)..(36): Xaa in position 36 is Asn or Pro
TNXXGXPCLSKRHQXLXXGFFXHXXQXXXXXXXXHX

SEQ ID NO: 1074 - protein, 29 aa, Artificial sequence
  protein pattern
  Variant (9)..(9): Xaa in position 9 is Ala or Ser
  Variant (10)..(10): Xaa in position 10 is Thr or Val
  Variant (22)..(22): Xaa in position 22 is Asn, Ser or Thr
HGFAGYFDXXLYKDVHLGIEPXTATPNMF

SEQ ID NO: 1075 - protein, 56 aa, Artificial sequence
  protein pattern
  Variant (2)..(3): Xaa in position 2 to 3 is any amino acid
  Variant (5)..(5): Xaa in position 5 is Ile or Val
  Variant (11)..(11): Xaa in position 11 is Ile or Leu
  Variant (12)..(12): Xaa in position 12 is Ala or Val
  Variant (22)..(22): Xaa in position 22 is Leu or Met
  Variant (24)..(24): Xaa in position 24 is Asn, Arg or Ser
  Variant (25)..(25): Xaa in position 25 is Ile or Val
  Variant (27)..(27): Xaa in position 27 is any amino acid
  Variant (31)..(31): Xaa in position 31 is Pro, Ser or Thr
  Variant (33)..(33): Xaa in position 33 is Pro, Gln or Ser
  Variant (38)..(38): Xaa in position 38 is Asp or Thr
  Variant (41)..(42): Xaa in position 41 to 42 is any amino acid
  Variant (44)..(44): Xaa in position 44 is Asp, Pro or Thr
  Variant (45)..(47): Xaa in position 45 to 47 is any amino acid
  Variant (52)..(52): Xaa in position 52 is any amino acid
  Variant (55)..(55): Xaa in position 55 is any amino acid
LXXDXKAHKDXXHFETAYVVKXHXXAXLAPXQXVFTFXHPXXSXXXXNQRYXKLXF

SEQ ID NO: 1076 - protein, 15 aa, Artificial sequence
  protein pattern
  Variant (7)..(7): Xaa in position 7 is Ala or Gly
  Variant (8)..(8): Xaa in position 8 is Ala, Pro or Ser
  Variant (9)..(9): Xaa in position 9 is Ser or Thr
HFWRCCXXXKVWYEW

SEQ ID NO: 1077 - protein, 20 aa, Artificial sequence
  protein pattern
  Variant (4)..(4): Xaa in position 4 is any amino acid
  Variant (5)..(6): Xaa in position 5 to 6 is Asn or Thr
  Variant (7)..(7): Xaa in position 7 is Leu or Met
  Variant (8)..(8): Xaa in position 8 is any amino acid
  Variant (13)..(13): Xaa in position 13 is Leu or Val
  Variant (16)..(16): Xaa in position 16 is any amino acid
  Variant (18)..(18): Xaa in position 18 is Pro or Ser
  Variant (19)..(19): Xaa in position 19 is Asp or Glu
  Variant (20)..(20): Xaa in position 20 is Asp, Gly or Pro
LQGXXXXXLWLRXPLXKXXX

SEQ ID NO: 1078 - protein, 19 aa, Artificial sequence
  protein pattern
  Variant (3)..(3): Xaa in position 3 is Phe or Val
  Variant (4)..(4): Xaa in position 4 is Ala, Cys or Ser
  Variant (5)..(5): Xaa in position 5 is Ala or Gly
  Variant (9)..(9): Xaa in position 9 is Ile or Val
  Variant (11)..(11): Xaa in position 11 is Gly or Ser
  Variant (13)..(13): Xaa in position 13 is Ala or Ser
  Variant (17)..(17): Xaa in position 17 is Asn or Ser
LPXXXSDLXLXPXQWSXHV

SEQ ID NO: 1079 - protein, 22 aa, Artificial sequence
  protein pattern
  Variant (4)..(4): Xaa in position 4 is any amino acid
  Variant (13)..(13): Xaa in position 13 is Asp or Glu
  Variant (15)..(15): Xaa in position 15 is any or no amino acid
  Variant (17)..(17): Xaa in position 17 is any amino acid
  Variant (18)..(18): Xaa in position 18 is any or no amino acid
  Variant (20)..(20): Xaa in position 20 is any amino acid
SWEXWNSFRLLCXHXSXXLXVA

SEQ ID NO: 1080 - protein, 22 aa, Artificial sequence
  protein pattern
  Variant (3)..(3): Xaa in position 3 is Ala or Pro
  Variant (10)..(10): Xaa in position 10 is any amino acid
  Variant (12)..(12): Xaa in position 12 is Ile or Val
  Variant (13)..(13): Xaa in position 13 is any amino acid
  Variant (15)..(15): Xaa in position 15 is any or no amino acid
  Variant (17)..(20): Xaa in position 17 to 20 is any amino acid
  Variant (21)..(21): Xaa in position 21 is any or no amino acid
WFXIFFPLRXPXXVXPXXXXXE

SEQ ID NO: 1081 - protein, 21 aa, Artificial sequence
  protein pattern
  Variant (3)..(3): Xaa in position 3 is any amino acid
  Variant (4)..(4): Xaa in position 4 is Asn or Thr
  Variant (7)..(7): Xaa in position 7 is Ala or Gly
  Variant (10)..(10): Xaa in position 10 is Phe or Met
  Variant (13)..(13): Xaa in position 13 is Pro or Ser
  Variant (20)..(20): Xaa in position 20 is any amino acid
PSXXSLXRWXGEXVRAAILXT

SEQ ID NO: 1082 - protein, 15 aa, Artificial sequence
  protein pattern
  Variant (3)..(3): Xaa in position 3 is Ile or Met
  Variant (6)..(6): Xaa in position 6 is Ser or Thr
SPXHNXNGRSYWVGL

SEQ ID NO: 1083 - DNA, 1971 bp, Arabidopsis thaliana
  CDS (1)..(1971)
atgaattcaaattcagtcggtgtatttcgtgagaaggaaatcgatgggaaaccattccacacatacactttatcatctcaaacagacaccacaaccccttcttcttccggtgaaacagccattgatggcgacgaccatctctctcttcaacaacctcttttcctctgtccttctttacgtcttaaagctgacgagataaactattcttatagtgaaattctaccgttcaatatttccccgtacttccccagcataagaggcgctgatcaacaagtccagcatttgcttgattccgacagccaacaagtccatgatttgcttcattccgacaacagccatgatgatgatggtgatgaaatctgtaagctcccagttgtccctatctattggtgtaacagtaaagaaattgagttcgatcaattcaattgcggtgcatgtgaacgatcaaagattggcacagactattatatctgtctcacgtgtgatctaatgttccacaaagaatgcgtggagtctccccttgagatcaaacacccttcctatccctttctttcactcaaactttacactcgtcacgagcagctcatgagttgcatgtgctgtaaacacccttccaatcttattttttattattgtcccacctacaaattgagtttgcatcccgattgtgcgatgaagccaatatccatttttatagaccacccaaaaaggcatccccaccttctcaccttttttcccaaacaagcttccttactttgcgatgtttgtagcctcattaaagaagctttccccacctatgtgtgtcttcgatgtatctttgtagcccatcgagattgtatctatttcccgtatgtcattaaaatatgtcgtcaccaacaccgtatctcttttacctcttctcttccatctggaaaatggtcttgtggagtatgtcgtaaaaaggttgacaacaattgtggtgcatacacttgcaacaagtgtagccactattttgttcatacaagatgtgcgttacgggaagacttgtgggatggaaaggatctcgagggagtacctgaagaacctgaaataattctcgagccatttgagacgatagctgatggaataatactccatttttctcatggccatcatctgaaactcaagaccagtggagtttacaacgaaaacattatttgtcaagcgtgcatccttccaatctatgagggtaattattactcgtgtatggatcaatgcaacttcatcctccacgaagcatgtgcaaatgcttctcgcaagaaagatcatgccttacacagtcacccacttacgctaaaagttgtctctgatatacagaatgaatactttaaaggttacttcaggtgttccgcttgtgatcgtgaaagttgtggcttcatctatgaggaggatcaatacagcatagacatacggtgtgcctctgtttctgaaccatttgattatcaaggccatgagcatcccttattccaagctttagaccgaaaagaagaaagggaggcaatttgtcaaatttgccgaaaaaagtatggtcgaaaactaaattgcatcgaatgcaattatattatatgtttcagttgtgctactttaccatacaaggcaaagtataagcttgacaaacatttcctcacatttcgggaaggggaagagggaagtgatcagttagactggtgtgaggtatgcgaaaagaaattagaatactcaagagaaggtgggttctatgcgtgtgatgactgctgcaccactctccatgttgattgtttgcttggaaaagagatgtatatgttgaatcctggtcatactgtaatggcttataggtcaaacatttatattcttcccaacaataccatgactcgaccattctgccaacttcataaagaagatcgttgtccacacaaagtaattttcaattggcatgacatgacattttgctcttacagttgttcgatggattag

SEQ ID NO: 1084 - protein, 656 aa, Arabidopsis thaliana
MNSNSVGVFREKEIDGKPFHTYTLSSQTDTTTPSSSGETAIDGDDHLSLQQPLFLCPSLRLKADEINYSYSEILPFNISPYFPSIRGADQQVQHLLDSDSQQVHDLLHSDNSHDDDGDEICKLPVVPIYWCNSKEIEFDQFNCGACERSKIGTDYYICLTCDLMFHKECVESPLEIKHPSYPFLSLKLYTRHEQLMSCMCCKHPSNLIFYYCPTYKLSLHPDCAMKPISIFIDHPKRHPHLLTFFPKQASLLCDVCSLIKEAFPTYVCLRCIFVAHRDCIYFPYVIKICRHQHRISFTSSLPSGKWSCGVCRKKVDNNCGAYTCNKCSHYFVHTRCALREDLWDGKDLEGVPEEPEIILEPFETIADGIILHFSHGHHLKLKTSGVYNENIICQACILPIYEGNYYSCMDQCNFILHEACANASRKKDHALHSHPLTLKVVSDIQNEYFKGYFRCSACDRESCGFIYEEDQYSIDIRCASVSEPFDYQGHEHPLFQALDRKEEREAICQICRKKYGRKLNCIECNYIICFSCATLPYKAKYKLDKHFLTFREGEEGSDQLDWCEVCEKKLEYSREGGFYACDDCCTTLHVDCLLGKEMYMLNPGHTVMAYRSNIYILPNNTMTRPFCQLHKEDRCPHKVIFNWHDMTFCSYSCSMD

SEQ ID NO: 1085 - DNA, 1335 bp, Arabidopsis thaliana
  CDS (1)..(1335)
atgaatatagtttgtgcggaaaaaccaccagtcttgtatatagaccatccgaattggcatcagcatacacttgctctctttcctagacaagctttcttaacttgcaatgtgtgcgccttggccgatgcaagctctcctatctatatgtgtcccccttgtgattttgtggtccatctaagatgtatcaacttaccacgtgtcataaggatatctcgccacccccatcgcatctcttttacccctttgttcgaccaacgagatagatcttgtggtgtttgtcgcgaaactatcgacaacgattttgggggttattcttgcatcaaggatgattgttcgtacggagcacattcaagatgtgccacacaaagaaatgtgtgggatggcatagagcttgaaggggtgttagaagagattgaagaagaagttgagccgtttgtgacgataagtgatggaatcatacaacattttagtcatcaacaacatcatttgagacttgatgagaacaaagacagagattacgatgacagtaagcagtgtgatgcatgcatcacaccaatctattttggtaacctctactcttgtatacaatgcagcttcattcttcacgaagaatgtgcgaatttatctcgcaaaatacatcacccgatacatccacctatgctctccctagtgggaggatataacgaagttagaaagtatgaggataagtgttcagcttgtccttggtcgtgcatagcaggtttcttctatgtgtgtgataaagaaggatgttattttaagattcatgtgcagtgcgctacaatttctgagccattagtccatgaaagtcatatggatcctttattcctaacatctaaaccaggagagcaaagaggatgctctgtttgcaaagattcaagacttgaatgtacaaatgaaacattcaattgcatcaaatgcgactttgctttgtgttttggatgtgctactttacctcaaaatgtgaggtataagcatgatgatcatattctcactctttcttatgggaaggagacaaatactgagacatattggtgtgaagtctgtgaggaaaaagtaagttcgaaagaccggttttataagtgtgatgaatattgttgtgtcaccttacacatcagatgtctgattgggaaggacttatacatgaagcccggttcattgtgtatctacaaggatggaagaaagctatttgtgttgcccaataatcatatgtctcgaccatcttgcacaggttgtaggaagcgatgtccatacaaaacagtgttggtgcttattcgattaatattttgttccacattttgtattcatcatgtttag

SEQ ID NO: 1086 - protein, 444 aa, Arabidopsis thaliana
MNIVCAEKPPVLYIDHPNWHQHTLALFPRQAFLTCNVCALADASSPIYMCPPCDFVVHLRCINLPRVIRISRHPHRISFTPLFDQRDRSCGVCRETIDNDFGGYSCIKDDCSYGAHSRCATQRNVWDGIELEGVLEEIEEEVEPFVTISDGIIQHFSHQQHHLRLDENKDRDYDDSKQCDACITPIYFGNLYSCIQCSFILHEECANLSRKIHHPIHPPMLSLVGGYNEVRKYEDKCSACPWSCIAGFFYVCDKEGCYFKIHVQCATISEPLVHESHMDPLFLTSKPGEQRGCSVCKDSRLECTNETFNCIKCDFALCFGCATLPQNVRYKHDDHILTLSYGKETNTETYWCEVCEEKVSSKDRFYKCDEYCCVTLHIRCLIGKDLYMKPGSLCIYKDGRKLFVLPNNHMSRPSCTGCRKRCPYKTVLVLIRLIFCSTFCIHHV

SEQ ID NO: 1087 - DNA, 1809 bp, Arabidopsis thaliana
  CDS (1)..(1809)
atggatcctctgaaaattgaaaatgctgctaatattactgtttgtcgtctaagacatgattttgatcaaaaagaagactttcgttccgaacatttcaaagattcacctgtcctagttttatatcctctcgatgaaagaaaagttcttcggtctacacatacaagcagttcacatccccttgtctggtgcaacaacggagaaaacaaagataaatactgcaaacgggagtccaggtgcagagtttgctcttatctgttagatgacgacattggctattatttcctacgcgaagacttgggtcagaaggagcgtatcttttttcataaagagtgtatcgaaccgataacaaataatccttatcatcgtaaacatccgctccaagttctcgtatctgattatttaaagctaaacacaatatgctattgttgttgtcgtcgtaaagaattgaatttctattgctctatatgcaatttttgcatttgtgctaactgtgaagcaaaaccaccactccttacgatagaccacaaaaaaaggcacgaacatatgttgtcttattttcctagagaagcttccattacttgcaatgtttgtgctttggacgagcgaaggtattttctatatatttgccatcaatgtgattttgtagtccataaagaatgtatatattcgccgtgcatcataaaaatatctcggcatcaacaccgcctatcatttgcttcatcgtttcttcctcggaaatggttttgcggggtttgtcgcaaaaaggttgatgagaactatggaggatattcttgcgtgaaaggttgttattatgtttctcattctcgatgtgctttacataaagatgtatgggatggaaaagaactcgaggaagaaccagatgaaatatataaagatattttgccatttaaagagatagctggtgggattatacaacattttagtcataaacatcaaatgagactccacaaatatattgataaaaagattgaggataacaaacattgtcaagcatgtgcacttccggtttataattgtgatatttttagttgcatggaatgtgagttcatcctccatacagtatgtgcaaatctttcactgcaaaaagaacatgtaatacatcctcacgccctcttcttacaagtgggacatatgttcagttgttcagcttgccagcgtcaaagcaatagtttcacatacatgtgtctaatgaccaattgtaatttccgtttagacgtaatttgtgcatccacgtctgagccacttaaccatcattttcatccacatcttttgtttctaccgtctgattttggatctacaagaatctgttcgatttgcaaagtacgctcacaaacccgtttcgattgtggaaaatgtgactttgttttgtgtttttactgcgctactataccaatgaaatttaggtacaagcatgacgaacatcttctcactttttcgtatgaacaagatgcgagtagtgagcactggtgtgatgtctgtgaaagaaaaatatatctcaagaatggaatttatatgtgcagtgaatgcgacatcacactccatattcaatgcttacttgggaaggagatgtatatgttaccaggtaaagagatgattatatatggtggagaagaaaaagatattcttcgcagtaatcgtctcacgcgatacatatgcaagaagtgtaataaacgttgtcaaaacggaatagtatacaaaaattccgacgagacaatatgttgttctatggaatgtctatatcaaatgtttagttcttatatttttaataaacgatcaattactttatga

SEQ ID NO: 1088 - protein, 602 aa, Arabidopsis thaliana
MDPLKIENAANITVCRLRHDFDQKEDFRSEHFKDSPVLVLYPLDERKVLRSTHTSSSHPLVWCNNGENKDKYCKRESRCRVCSYLLDDDIGYYFLREDLGQKERIFFHKECIEPITNNPYHRKHPLQVLVSDYLKLNTICYCCCRRKELNFYCSICNFCICANCEAKPPLLTIDHKKRHEHMLSYFPREASITCNVCALDERRYFLYICHQCDFVVHKECIYSPCIIKISRHQHRLSFASSFLPRKWFCGVCRKKVDENYGGYSCVKGCYYVSHSRCALHKDVWDGKELEEEPDEIYKDILPFKEIAGGIIQHFSHKHQMRLHKYIDKKIEDNKHCQACALPVYNCDIFSCMECEFILHTVCANLSLQKEHVIHPHALFLQVGHMFSCSACQRQSNSFTYMCLMTNCNFRLDVICASTSEPLNHHFHPHLLFLPSDFGSTRICSICKVRSQTRFDCGKCDFVLCFYCATIPMKFRYKHDEHLLTFSYEQDASSEHWCDVCERKIYLKNGIYMCSECDITLHIQCLLGKEMYMLPGKEMIIYGGEEKDILRSNRLTRYICKKCNKRCQNGIVYKNSDETICCSMECLYQMFSSYIFNKRSITL

SEQ ID NO: 1089 - DNA, 1839 bp, Arabidopsis thaliana
  CDS (1)..(1839)
atgggttttgaagatggaccaagatgtcttatgtctcatccagctcacccttctcataacttgtccgttcgatacagattcaactttcgtatcggttgctttacatgtggcgggaaagcagctgctacgacgccggattgtctctactactactgcaccacctgcgaggtgacgttccacaatggttgccatcaacgtccaagaaggataacacatccttatcacctccaacatcctcttactctcttctatcgaaaccccgaaaccagagttatatccaacatcatccctgatgcttgtcctggtaaaattgaggatacatcaggtccagagaagtatgaattcgtggatatcgtcccgtataagtctgatatcatattcaacaaatgcacttggtgtgcaaaagatttcaaaggtgattggttttatcgttgtttgatctgtagtttttgcttggatctctcttgtgcggcaactcttccacttcttactattacaaacccgaaaagccatcaccactctctcgtcttcttaccccggccattattagttccatgtgatgcttgtgggttggttgacgggttggaaccaagttatgcttgtttccaatgtaattacatggttcatcagaattgcatagacttaccccgagtcataaaaatcacgcgtcacccgcaccggctctctcatactccttattgttcatctttgacttcgtcatgccaaatctgctataaagaggttgatatcaagtatgggcaatattcttgccatctccaagattgtttttatgtagtccattctaaatgtgcaacacatgaaaatgtttgggatgggaaggaactcgagtgggaaatcgagtctgatgaaactgaagatatttcaccttttaggaacctaggtgatggtttcataaagcatttttgtcacaaacaccgtttgaagctcaagaatcatgatggtgctcgagacacagaaaagcaatgtcgagcgtgcatatatccaattgtttctcaccaattttaccattgcaagaaatgcaattactctctccacgaggtatgtgctggcctttctcgaaaactggatcatgcattgcacaatcacactcttatcctatctccatctcccggaaagttttgttgttcagcttgttcccgagaatccactggtttcagttacatatgctctaataaaggttgccaagattttgttctagatgttcgatgcatctcagtgctagagtatttcatccatagaagtcacgaacatcccatttttatctccacatcctacaacagtaaagacgagatcctctgcaaagtttgcaagaaaagatgtttgggggctcatctacagtgtacgttatgcgagtttactatgtgttactcatgtgctatcattccagatgaaatacactacaaatttgacaagcatcctctcaccctttcttgtggggaaagcgcggataacacgtattggtgcgaggtgtgtgaaaaacaattggatccaaaagaatggttctacacatgtaacaaatgttgcatcaccatccaccttcattgcatatttggatcttctgtctttatgaaacctggttccatatttcgtgattattatggaaaggtgcaagtttttcgaaacaatagtaacactcgacaactctgttatatgtgtcacaaccgttgtaccggtttgatcttctacgaaggctacagaaggaatgctacatattactacaatcatagcaatcgatcaactcatagaatgattttttgctctttggaatgtgagatattagggatgagaaaacgtcgtctcatccgtcttccgaggtaa

SEQ ID NO: 1090 - protein, 612 aa, Arabidopsis thaliana
MGFEDGPRCLMSHPAHPSHNLSVRYRFNFRIGCFTCGGKAAATTPDCLYYYCTTCEVTFHNGCHQRPRRITHPYHLQHPLTLFYRNPETRVISNIIPDACPGKIEDTSGPEKYEFVDIVPYKSDIIFNKCTWCAKDFKGDWFYRCLICSFCLDLSCAATLPLLTITNPKSHHHSLVFLPRPLLVPCDACGLVDGLEPSYACFQCNYMVHQNCIDLPRVIKITRHPHRLSHTPYCSSLTSSCQICYKEVDIKYGQYSCHLQDCFYVVHSKCATHENVWDGKELEWEIESDETEDISPFRNLGDGFIKHFCHKHRLKLKNHDGARDTEKQCRACIYPIVSHQFYHCKKCNYSLHEVCAGLSRKLDHALHNHTLILSPSPGKFCCSACSRESTGFSYICSNKGCQDFVLDVRCISVLEYFIHRSHEHPIFISTSYNSKDEILCKVCKKRCLGAHLQCTLCEFTMCYSCAIIPDEIHYKFDKHPLTLSCGESADNTYWCEVCEKQLDPKEWFYTCNKCCITIHLHCIFGSSVFMKPGSIFRDYYGKVQVFRNNSNTRQLCYMCHNRCTGLIFYEGYRRNATYYYNHSNRSTHRMIFCSLECEILGMRKRRLIRLPR

SEQ ID NO: 1091 - DNA, 1593 bp, Arabidopsis thaliana
  CDS (1)..(1593)
atgacaacgctctgcgaaagctattttgcatgtctccaatgccaaggaaagttccacaaagaatgtgttgagtctccacctgagatcaaacacccttcccacccctttcattctcttcgactttgcagttttcaaacgaggcttactagcggttgttgtagaaaaattacctttggcatgttttatcagtgtacaacctgcaatttgagtatgcatcccgtctgtgcgatgaggccagtacccttggttgtagaccatcctaaaagccatccccatcctctctcctttttccctacacaagcttctacagtttgccatatttgtgccaagattaagcatcttgatcccacatatatctgtatccaatgtgtcttcgtaatccataaaggttgtatgggtttcccacataccataagaatatctcgtcaccctcaccgtatctcttttacctcttcccttccatctagaacgctgtcttgtggagtctgtcatcaacaagttgacaacaattatggtgcatactcttgcaataattgtgacggttattttgttcattcaaaatgtgcaatacatccaaaagtgtgggatggaaaagaactcgaaggagtaccagaagaagatgatttgatagacgatggtgagccgttcgagaggatatctgatggaattatacaccatccttttcatagtcaccacttgcgacatgagatgagcataacttatgatgaaagtaagtattgtcaagggtgtgctcttccaatctatgaaggtcagttttattcatgcatggaatgtgacttcatcctccatgacagttgtgcaaatgctccacggatgaaacggtatcctttatatccacatccaataacacttaaatttgccaccgtgagaaataatagtttcacaagtcaatttcgttgtgctgtatgtgatcgtcatggtaatggtttcttctatgagcatcacggcgaagataaaatgttccggctagatttacggtgtgccttgattaccgaaccgttggtatatcaaggccacatgcatcccttattcctactgtgggacgacacagagagtctgataagttgtcaaatgtgcaaaaagaaaagctactattcacaactgttttgcctggaatgcgagtattctctatgtttgcgttgtgttaccttcccatataaagtaaggtataagcatgatagtcattttctcacaatttgcgatgtgaaggaggcaagtgatgaactagactggtgtgacatttgtgaaggcaaaatagaagaagagaaagaaaaggaatataattgggatgatagagaaagagagctacgattctataaatgcaatgattgtagcactgctcttcatgttgattgtttgcttggtgtagacatgtacatgaaacctattacagactacatttctgtcatcacgctcacatctaagggtacgaaacggaaagatctttggatttttcttaacaactctctcactcgaccaatttgcactacatgcttaagtcgttgtccattcccaatatttttcaaagggcacaccaaaatcttctgttctttgtattgtagtgaggactga

SEQ ID NO: 1092 - protein, 530 aa, Arabidopsis thaliana
MTTLCESYFACLQCQGKFHKECVESPPEIKHPSHPFHSLRLCSFQTRLTSGCCRKITFGMFYQCTTCNLSMHPVCAMRPVPLVVDHPKSHPHPLSFFPTQASTVCHICAKIKHLDPTYICIQCVFVIHKGCMGFPHTIRISRHPHRISFTSSLPSRTLSCGVCHQQVDNNYGAYSCNNCDGYFVHSKCAIHPKVWDGKELEGVPEEDDLIDDGEPFERISDGIIHHPFHSHHLRHEMSITYDESKYCQGCALPIYEGQFYSCMECDFILHDSCANAPRMKRYPLYPHPITLKFATVRNNSFTSQFRCAVCDRHGNGFFYEHHGEDKMFRLDLRCALITEPLVYQGHMHPLFLLWDDTESLISCQMCKKKSYYSQLFCLECEYSLCLRCVTFPYKVRYKHDSHFLTICDVKEASDELDWCDICEGKIEEEKEKEYNWDDRERELRFYKCNDCSTALHVDCLLGVDMYMKPITDYISVITLTSKGTKRKDLWIFLNNSLTRPICTTCLSRCPFPIFFKGHTKIFCSLYCSED

SEQ ID NO: 1093 - DNA, 2004 bp, Arabidopsis thaliana
  CDS (1)..(2004)
atgaattcaaattcagtcggtgaatttcgtgagggagaaatcgatggaaacccatttctcatatacactttgttatctcaaaccgagaacccttcttcccgtgaagcagctgttgattccgatggagggactgtggacgacctctctgttgagcctctgatcctctgtcctactttacgtctcaaagttaaaaatttaaagccatacacgagtgattcagatcgtagctttttcccgttggttgtttcctctcacttccctaccatacaaagcggtcatcaacaacccgagtatatgcttcaatcctacagctgtaagctccctttactccctctcttttggtgcgacaataaaaaccctaatatttacgatttcatttgccgtgcgtgcacaaccatagagcaaggcacaagctattacgtttgtgtcacatgtggtgaccagtttcacaaagaatgtgttggtgctccactcgagttcaaacaccctttctatccatctctttctctccaactttatagtcctccctccggccgcgtattatgttcatgttgtcaaaaacctatctatggcatgaattattattgtcctaccagcaacttcactttgcatctgttttgtgctttcaagccaataccctttgttatagatcaccccaaaaggcatccccatcccctcaccttttttcccaaacaatctttcttaccttgccatgtttgtagcctcattaaaaaattcattccaacctatatttgtattcgatgcgccttcgtagtccatcaagattgtatctatttcccgtatgtcataaaaatatctcgccaccaccatcgtatctcttatacctcctctctttcatccggaaaatggtcttgtggagtttgtcgtcaagaggttgacaacgactatggtgcctactcttgcaacaagtgtgatgactattttgttcattcaagatgcgcgttgcggagagacatatgggatgggatagaactcgagggagtacctgaagaacttgagataattgttgagccatttataacaatatctgatggaataatactccatttttctcatggtcatcatctgaaactcgataccagtaaagcttacgatgaaaacaagctttgtcaagcgtgcacccttccgatctacgagggtggctattattcaggtgtggatgagtgtgacttcatcctccacgaagcatgtgcaaatgcaccttgcaagaaatatcatgcgttgaatccttatccactcacactaaaggttgtcactaatgaatatcatgacaacaaaggacgttttcgttgtgatgcttgtcagcgtgaaagttgtggttttgtctatgtggacgatttcagaggatgttatgctgatacaaaagattataaatttaaaatagatatacgatgtgcctcggtttctgaaccatttgattatctaggtcatgagcatcccttatacctagctttgaatccagaagaagaggagtcagcaatatgtcacatatgccaagaaagtaaagatgagtcgttttcttgtaaaaaactaaattgcattgaatgtgattttgtgatatgcttcaagtgtgctaccttaccatacaaggcaaggtatcaacatgacaaacatttcctcaagttttatgaagcgaaagaggcaaatgatcattcagagtggtgtgatgtatgcgaaagaagaatagcagatttgagaaagaaagggttctattcatgcgacgactgttgcaccactcttcatattgattgtttgcttggggaagacatgtatatgaagcctggtcacaccataatgtataatatgacgggttcccgcaaacattatcagaagaagcttcatattcatagcaacaatactttgtctcggccattttgcagtgagtgcggggagcgttgtcgacagaaaatagttttcgaatacaaagaaaaatatatattttgtgctgtatcttgccagaagcttgtaattgattactcatag

SEQ ID NO: 1094 - protein, 667 aa, Arabidopsis thaliana
MNSNSVGEFREGEIDGNPFLIYTLLSQTENPSSREAAVDSDGGTVDDLSVEPLILCPTLRLKVKNLKPYTSDSDRSFFPLVVSSHFPTIQSGHQQPEYMLQSYSCKLPLLPLFWCDNKNPNIYDFICRACTTIEQGTSYYVCVTCGDQFHKECVGAPLEFKHPFYPSLSLQLYSPPSGRVLCSCCQKPIYGMNYYCPTSNFTLHLFCAFKPIPFVIDHPKRHPHPLTFFPKQSFLPCHVCSLIKKFIPTYICIRCAFVVHQDCIYFPYVIKISRHHHRISYTSSLSSGKWSCGVCRQEVDNDYGAYSCNKCDDYFVHSRCALRRDIWDGIELEGVPEELEIIVEPFITISDGIILHFSHGHHLKLDTSKAYDENKLCQACTLPIYEGGYYSGVDECDFILHEACANAPCKKYHALNPYPLTLKVVTNEYHDNKGRFRCDACQRESCGFVYVDDFRGCYADTKDYKFKIDIRCASVSEPFDYLGHEHPLYLALNPEEEESAICHICQESKDESFSCKKLNCIECDFVICFKCATLPYKARYQHDKHFLKFYEAKEANDHSEWCDVCERRIADLRKKGFYSCDDCCTTLHIDCLLGEDMYMKPGHTIMYNMTGSRKHYQKKLHIHSNNTLSRPFCSECGERCRQKIVFEYKEKYIFCAVSCQKLVIDYS

SEQ ID NO: 1095 - DNA, 1986 bp, Arabidopsis thaliana
  CDS (1)..(1986)
atggaaccactacctccttatttctctagagctaaacctccatgtcgtctttccgatccggctcagccccacatgctttgccgacggcgacggccatctcatcctccactttctatctgcttttcttgcaaaggcaagcaattaaagcgcaataattattattattactgtgctacttgcaatttggaattccatagaggctgtcacatctttctgccggagataagacatccttttcatccttctcaccccctcaccttcatctccttattacttcctaaatttgatgttactaagatacccaaaaattggatggacagctcctcttcatcagacgaatctgaagacgatgatgacgacgaaaaatcgataaaggaagaatgtgaagacgatggtgatgatgatgatggcgacagttctgattctgatgatgacgacaacaattttgatgctaataatgatggtgcctctttatccgatggaaatcacttgaaatgcaaatgttgtcaggttcctttagaaaagatatattatcattgttctatctgcaagttcaatcttaacgtggaatgctcgatgagaccaccacctaccactatctcacacttgaaaagtcatgagcacatcctcacccttttccctatacgactccctctaccatgtggggcgtgcggcttgtctctaagtgacgccgaagatcttgtttacgcttgtctcccttgcaaccttttggtccacagatcttgtatctatctacctcgtgtcattaagatcacccgacacccccatcgtctctctctcactccctcccttcaacctggtgatttctcttgtggagtttgtcgccaaacagttgacgtcaactacgggcaatactcttgtgataaggaatgtcattatgctgtccattcaaaatgtgcaacaaggaatgacgtgtgggatggaaaagatcttgatggagtgcctgaagaacccgatgagtttatcgaaccgccattcctgaagattgatgaggagactattcaacatttcagtcatcaccatcatctaaagctccatgaaaagaaaaccattggcgggaaagacaagttttgtgaggcatgcacccttccagtaatgatctctcagagatattatggttgtatgcagtgtgattttgttcttgatgaaacatgtgcttctcttcctcgcaagaaaaaccacccactacataaacacccgcttaaccttcacattttgcctcttggtgagtctgccatgatcaataaaggtgctactagcaaagacatattccaatgtattggttgcggccgaattggctgtggtttcttctacaaatgcgatgaaaaagattgtgatgagtttctcctagacgtcagatgtgcttcccttccagatccttttgttcatgactgtcatccccatgatcatcctctcttctttaacttgaccaaaggtaattgcatggggtgtggttctgataactgttcatcctatttcttggaatgtattaaatgtaagtcctttttgggaatcaagtgtgctactctgccttgtgaggcccactacatacacgataggcatccaatcactctttgttacggggaagaagatactacaagtggccaatattggtgtgagatatgcgaattaaaattagatccaaagacatggttttattcttgcgacttctgtaagatcactctccatgtcaactgtttactgggggaagatatctatctgaagccctgccacattttcaaagttggtctttattataaggaagttgaaattgctcggaatgatggtaattctcggctgttttgctatacatgtgaacttcgttgtggacagactttggtattcaagtatataggtggatgcaaaagcttttgtactcttcgatgtattggaaactattttgatgcgaaagatgggtgggtttatgatgcagcgagaaatttgaatattttccggaggatctag

SEQ ID NO: 1096 - protein, 661 aa, Arabidopsis thaliana
MEPLPPYFSRAKPPCRLSDPAQPHMLCRRRRPSHPPLSICFSCKGKQLKRNNYYYYCATCNLEFHRGCHIFLPEIRHPFHPSHPLTFISLLLPKFDVTKIPKNWMDSSSSSDESEDDDDDEKSIKEECEDDGDDDDGDSSDSDDDDNNFDANNDGASLSDGNHLKCKCCQVPLEKIYYHCSICKFNLNVECSMRPPPTTISHLKSHEHILTLFPIRLPLPCGACGLSLSDAEDLVYACLPCNLLVHRSCIYLPRVIKITRHPHRLSLTPSLQPGDFSCGVCRQTVDVNYGQYSCDKECHYAVHSKCATRNDVWDGKDLDGVPEEPDEFIEPPFLKIDEETIQHFSHHHHLKLHEKKTIGGKDKFCEACTLPVMISQRYYGCMQCDFVLDETCASLPRKKNHPLHKHPLNLHILPLGESAMINKGATSKDIFQCIGCGRIGCGFFYKCDEKDCDEFLLDVRCASLPDPFVHDCHPHDHPLFFNLTKGNCMGCGSDNCSSYFLECIKCKSFLGIKCATLPCEAHYIHDRHPITLCYGEEDTTSGQYWCEICELKLDPKTWFYSCDFCKITLHVNCLLGEDIYLKPCHIFKVGLYYKEVEIARNDGNSRLFCYTCELRCGQTLVFKYIGGCKSFCTLRCIGNYFDAKDGWVYDAARNLNIFRRI

SEQ ID NO: 1097 - DNA, 2055 bp, Arabidopsis thaliana
  CDS (1)..(2055)
atgaaaccacctccttatttttctgtatctgaaccccaatgtcgtttgtccgatccggctcagccacacaagctttgccgccggagacggcgatctcacggtccactttctatctgcttttcgtgcaaaggcaagcatttagagggtagaaagtactattactattgtgctacttgcaagttagaattccacagaggctgtcacctccttccgccggtgataagacacccttttcacccctctcaccttctcaccctcatctccttaccacctggttttgatatttctaagataccccgcaataccgacgacggctccgcggcttcagaaagatcgataaacgaaactgacgatgatgatgactctgaagacggtggccatgatgatgaagataacaattttgttgacgatgatgttattgttaatgatggtgatggtgttggtgaagatcgtgatggtgacagtgatggggatggtgatggtggtgatgatgatgatgatgatgattttcaacaagatatttattatcgtgtaaatggttatgattattattataataactatgatgatggagataacgctgcctatgcctctatatccgatggaaatgatcaccgcaaatgcaaatgttgtcaagatcctttaaaaaaggtacattatcattgttctatctgcaagttcaatcttaacctgagttgctcgatgagaccaccacctcccactatctcacatttgaaaagtcatgagcacaccctcaccctattccctatacgactcccttcaccatgtgatgcttgtggtttgtctctaagcgacaccatagacctcatctacgcttgtctcccttgcagccacatgatccatagatcatgtatttatttacctcgtgtcattcagatcacccgacacccacaccgtctctctctcacttcctcccttcaagtaggtgatttctcttgtggagtttgtcgccagaccgtggacatcaactacgggcactactcttgtaacaagggatgtaactatgctgtccactcgaaatgtgcaacaagggaagatgtgtgggatggaaaagatcttgaaggagtgcctgaaaaacccgatgaagatatcgagccatttgttaggattgatgaggagacaattcaacatttcagtcatcatgagcattatatgaagctccatgaaaaggaaaccattagcgagaaagacaagttttgtgaggcatgcacccttccagtaatgatctctcagagatattatggttgcacggagtgtgattttgtactcgatgaagcatgtgcttctcttcctcggaaaatatacaacccactacataaacaccctcttaccctccagcccttccctattgatgagacatccaatatcgcagataatatttctaccaaaggcatatttgaatgtgatggttgccaccgattaggttgtgggtttgtgtacagatgcagtaaaagaaaatgtgtctttcgactagacgtgaggtgcgcttctcttccggatccttttattcatgactgtcatccacatgatctcttcttcaactcgaccaaaggtaattgcatagggtgtggttctgatgagtgttcatcctatttcctagagtgtattaaatgcaactcctttttgggtataagatgtgcgtctttgccttttgaggcacactacaaacacgataggcatccactcattctttgccgtgatgaagatacatcaagtggcctctactggtgtgagatttgtgaatcagaattagatccaaaaacatggttttatacatgtgatttttgtacgatcactctccatgtcaactgtttactcggaaaagatatgtacatgaagccccaatacatcttcaaaataggttatcgtcatcgtaaagttgaaattgctcgcaatgatggtaactctcggctcttttgcactagatgtaaacgtcattgtatgcagaatttgatatacaagaggataggtagagaccaaagctattgtactctgaaatgctttggagctaggcttatgctagaattattttga

SEQ ID NO: 1098 - protein, 684 aa, Arabidopsis thaliana
MKPPPYFSVSEPQCRLSDPAQPHKLCRRRRRSHGPLSICFSCKGKHLEGRKYYYYCATCKLEFHRGCHLLPPVIRHPFHPSHLLTLISLPPGFDISKIPRNTDDGSAASERSINETDDDDDSEDGGHDDEDNNFVDDDVIVNDGDGVGEDRDGDSDGDGDGGDDDDDDDFQQDIYYRVNGYDYYYNNYDDGDNAAYASISDGNDHRKCKCCQDPLKKVHYHCSICKFNLNLSCSMRPPPPTISHLKSHEHTLTLFPIRLPSPCDACGLSLSDTIDLIYACLPCSHMIHRSCIYLPRVIQITRHPHRLSLTSSLQVGDFSCGVCRQTVDINYGHYSCNKGCNYAVHSKCATREDVWDGKDLEGVPEKPDEDIEPFVRIDEETIQHFSHHEHYMKLHEKETISEKDKFCEACTLPVMISQRYYGCTECDFVLDEACASLPRKIYNPLHKHPLTLQPFPIDETSNIADNISTKGIFECDGCHRLGCGFVYRCSKRKCVFRLDVRCASLPDPFIHDCHPHDLFFNSTKGNCIGCGSDECSSYFLECIKCNSFLGIRCASLPFEAHYKHDRHPLILCRDEDTSSGLYWCEICESELDPKTWFYTCDFCTITLHVNCLLGKDMYMKPQYIFKIGYRHRKVEIARNDGNSRLFCTRCKRHCMQNLIYKRIGRDQSYCTLKCFGARLMLELF

SEQ ID NO: 1099 - DNA, 1974 bp, Arabidopsis thaliana
  CDS (1)..(1974)
atggaaccacaccctctttattttgtgccacctccttatttaactagaactaaacctccatgtcgtctgtccgatccggctcagccccacaagctttgccgacggcgacaaccaactcatcctccactttctatctgctttacgtgcaaaggcaaacacttgaagcgcagtaagtattattactactgtgctacttgcaatttggaatttcacagaggctgtcacgtctttctgccggagatcagaagcgcttttcatccctctcaccccctcaccttcaccgccttagatcctgaatttaatgcttctatcatacaccaaaattggagggacagctccgcttcagaggaatcttccgaagagttgataaacgaagttgttgactatgatcatgaagacgctggtgatgatgctgttgctaatgaagacgatgatgaagatgctgttcctaatgatgacgataatggcggtggcggtggcgatatttatgctgtcgcttataatgatggtgcctctttgtcctatggaaatcacctgaaatgcaaatgttgtgcttctcctttagaaaagctatattatcattgttctacctgcaagttcaatcttaacttgacttgctcgatgagaccaccacctaccactatctcacacttgaaatttcatgagcacaccctcaccctcttccttgtgcgaatcacttggccatgcgatgtttgtggctttcttctaaacaaagacaccgacgatctcgtttacgcttgtctaccttgcagccttatggtccacagatcatgtatctatctacctcgtgtcattaagatcacccgacacccacatcgtctctctctcacttcctcccttcaacctggtgatttctcttgtggactttgtcgccatactgttgacgttaactgcgggcaatactcttgtgataagggatgccaatatgctatccattcgaaatgtgcaacatggagagacgtgtgggatggaatagatcttgatggagtgcctgaagaacccgaggagtatatcgaaccgccattcctgaagattgatgaggacacaattcaacatttcagtcatcatgagcattatatgaagctccatgtaaagaaaaccattaccgagaaagacaagttttgtgaggcatgcacccttccagtaatgatctctcagagattttatggatgtatggagtgtgattttgtactcgacgaagcatgtgcttctcttcctcgcaaaatatacaacccactacataaacacccacttaccctccacgtcgtccctactattgacacctacacggacccgaatatgcctattaccaaagtcatattcaattgtataggttgcctccgatatggttgtggtttccactacagatgccatgaaaaaggttgtgaagaatttctactagacgtcaggtgcgcttcccttccagatcctctaattcatggttgtcatgcacatgatctcttcttcaactttaccggaggtatttgcatggggtgtggtactagtgagtgttcatccttttttctcgaatgcattaaatgcaaatcctttttgggtattaaatgtgctactttgccttctgaggcacactacagacacgataggcatccactcactctttgctaccgtgactatatgacaagtcatcattggtgtgagatatgtgaatcaaaattatctacatattattggttttatacatgtgactcttgtaaaatcactctccatgtcacctgtttactggggaaagatatctacgtgaagccccactacaccttcgtttcagattcaagtcatgatgatcaatttgaaattgctcgcaatgaaggtaactctcggcagctttgctctaattgcaatttgcgttgtgcacaaacattggtattcaagaggagaggtgaatacgaaagtttttgtactcttacttgtttgggagattctttggactcataa

SEQ ID NO: 1100 - protein, 657 aa, Arabidopsis thaliana
MEPHPLYFVPPPYLTRTKPPCRLSDPAQPHKLCRRRQPTHPPLSICFTCKGKHLKRSKYYYYCATCNLEFHRGCHVFLPEIRSAFHPSHPLTFTALDPEFNASIIHQNWRDSSASEESSEELINEVVDYDHEDAGDDAVANEDDDEDAVPNDDDNGGGGGDIYAVAYNDGASLSYGNHLKCKCCASPLEKLYYHCSTCKFNLNLTCSMRPPPTTISHLKFHEHTLTLFLVRITWPCDVCGFLLNKDTDDLVYACLPCSLMVHRSCIYLPRVIKITRHPHRLSLTSSLQPGDFSCGLCRHTVDVNCGQYSCDKGCQYAIHSKCATWRDVWDGIDLDGVPEEPEEYIEPPFLKIDEDTIQHFSHHEHYMKLHVKKTITEKDKFCEACTLPVMISQRFYGCMECDFVLDEACASLPRKIYNPLHKHPLTLHVVPTIDTYTDPNMPITKVIFNCIGCLRYGCGFHYRCHEKGCEEFLLDVRCASLPDPLIHGCHAHDLFFNFTGGICMGCGTSECSSFFLECIKCKSFLGIKCATLPSEAHYRHDRHPLTLCYRDYMTSHHWCEICESKLSTYYWFYTCDSCKITLHVTCLLGKDIYVKPHYTFVSDSSHDDQFEIARNEGNSRQLCSNCNLRCAQTLVFKRRGEYESFCTLTCLGDSLDS

SEQ ID NO: 1101 - DNA, 1962 bp, Arabidopsis thaliana
  CDS (1)..(1962)
atggtgtattctagaactaaacccccatgtcgtgtgtctgatccggctcagccccacaatctttgcagacgacgacggccttctccactttctatctgctttacatgcaaaggcaagaatttaacgtgcagaaagtactattactactgtgcaacttgcaatttagagttccacagaggttgtcacctctttccgccgaatctaagacacccttttcattcctctcaccctctcaccctcatctcttcaaacacacgcaacggttggtgggatggctcctccggttcagaaggatcaacagatgatgatgatagtgatgatgatgatcgtgatggtgatggtgatggtgatggtgatggcagcgttgatattgatggtgatgatgatgcgtatggcagcgttgatattgatggtgatgctgatgctgatgttaatgttgatgcctctttatccgatggaaatcacaggagctgccgatgttgtaacaaacctttggacaagacatattatcattgttctatctgcaagttcaatctcaacttgccctgctcgatgatgctaccacttctcactatctcacacatgaaaagtcatgagcacacgctcaccctcttctgtacacgactccctatgtcatgtgatgcttgtggcttgtctctaagcacacgcagcactctcctttacacgtgtctcccttgcagccacacagtccacataaaatgtatctatctacctcgtgtcattcagatcacccgacacacacaccgactctctttcactttgtcccttcaacctggtgacttctcttgcggagtttgtcgcaaaaccgtcgacgttaactatgggcaatattcttgtattaagggatgtcattatgctgtccattcgcattgtgcaacgaggaatgacgtgtgggatggagaagatcttgaaggagtgcctgaagaacctgatgaagatatcgagccatttgtgaggattgatgtggagacaattcatcatttcagtcatgaacattatctgaagctccaagaaaagaaaaccatttgcgagaaagacaagtattgtgttgcatgcacgattccaattataatctctcggagattttatggttgtatggagtgtgattttgtactcgacgaagcatgtgcttctcttcctcgcaaaaaatacctcccaatacataaacacccacttaccctccaccccttcccgattggtgggatctccaggttcgattttaatacagttgctgccaaagacatattcaaatgtaaagcttgctaccgattaagttgtggtttcgtgtacaaatgcggtgaggaatattgtgagtttcaaatagacgtcagatgcgcttcccttccagatcctttaattcatggctgtcatccacatgatctcttcttcaacttgacccatggttattgcattgggtgtagaccacgaaccgacttgaccaaggcacgtatgctcagctcacatgggccgggcctttgttcatcctatgcagtagaatgtattaagtgcgacgactcctttttgggtatgacatgtgctagttttccttgtgaggcctactacaagcacgataggcatctactcacactttgctacggtgacgaaaaagatacaacaagtggtcaatattggtgtgagatatgtgaatcagaattaaatgcagatgactggttttatacatgtgactcttgtatgatcactttacatatcgattgtttacttggaaaagatatgtacatgaagcccggccatatattcgaaataggtgatgatggtgatgaagttgaaattgttcacaatgatggtaactctcggctgatttgctctgaatgtaatcttcattgtgcacaggcttgggcattcaagatgatacgtggatacaaatggtattgcactcttaattgtatgggaaaaggtcttggccttggacgtctcaattga

SEQ ID NO: 1102 - protein, 653 aa, Arabidopsis thaliana
MVYSRTKPPCRVSDPAQPHNLCRRRRPSPLSICFTCKGKNLTCRKYYYYCATCNLEFHRGCHLFPPNLRHPFHSSHPLTLISSNTRNGWWDGSSGSEGSTDDDDSDDDDRDGDGDGDGDGSVDIDGDDDAYGSVDIDGDADADVNVDASLSDGNHRSCRCCNKPLDKTYYHCSICKFNLNLPCSMMLPLLTISHMKSHEHTLTLFCTRLPMSCDACGLSLSTRSTLLYTCLPCSHTVHIKCIYLPRVIQITRHTHRLSFTLSLQPGDFSCGVCRKTVDVNYGQYSCIKGCHYAVHSHCATRNDVWDGEDLEGVPEEPDEDIEPFVRIDVETIHHFSHEHYLKLQEKKTICEKDKYCVACTIPIIISRRFYGCMECDFVLDEACASLPRKKYLPIHKHPLTLHPFPIGGISRFDFNTVAAKDIFKCKACYRLSCGFVYKCGEEYCEFQIDVRCASLPDPLIHGCHPHDLFFNLTHGYCIGCRPRTDLTKARMLSSHGPGLCSSYAVECIKCDDSFLGMTCASFPCEAYYKHDRHLLTLCYGDEKDTTSGQYWCEICESELNADDWFYTCDSCMITLHIDCLLGKDMYMKPGHIFEIGDDGDEVEIVHNDGNSRLICSECNLHCAQAWAFKMIRGYKWYCTLNCMGKGLGLGRLN

SEQ ID NO: 1103 - DNA, 2040 bp, Arabidopsis thaliana
  CDS (1)..(2040)
atggaagaaatcacattgaagttaagttctcgtgctatactggtgtgtcgtcaatctgatccctctcagtcgacgcacttgctttctcgacgatatggtggtcaacgaatgtctaaatgcctcatttgcagaaccaagaaacatcatcgcactaagtatcatctccattgtgatacctgcgattatgatattcacaagtcctgttatctcttaccaagatgtcgttcaatgcctttaactaggcctcacactctccgtgagggaaacgattatcacagtagttgcgacacatgtggagacgaggtctccgaaaatgatcggagctatcattgtcctacttgtgaaatgtgttaccacaaggtttgcaacttgtacccgcatgagatcagacatccttttcacgcccaacatcctctgaaactcaccttctcctcagattcttcttttactgatttgaaggagctgcccgcttcatggcaagaggaaccctccgactccgaaacagaggactccgatgcgtcagatgatgtctcctcagattcttctatatccgatgatgtctcctcagattcttctatatccgatttgaaatgcaaatgttgtcagacgaatctccaagaggtatactatcactgttctatttgcaaatttaacctaaacctcacttgtgctagaaacccaccactttccactatctctcatctcaagagccatgagcaccccctctccatttttcctagacgaatccctttgccatgtgatgcttgtggcttgtctcttgaaaacaccaatgattacgtctatgcttgtctttcatgtaacctcatggtccacatggcatgtatcttcttaccacgtgttattaaaatcacccgtcatcaacaccgtttatctctctctccctctcttccttccggaatatacccttgtggcgtctgtcgccttaccattgatgtcacctatgggcagttttcttgcaataggggatgccactatgctgtccattccaaatgtgcaatagaagaaagaatatgggacggaaaagatcttgacggagttccagaagaacctgatgaagacgtcgagccatttgagaggattgatgacaagacaatacaacatttcagccatgagcattatctaagactcaacatcagaaacggagtttttgatgcagacagcttctgtcaggcatgcatcataccaatcttagagtctgaaagtttttatggttgtacgcaatgcagcttccttctccacgaagcatgtgcttcctttcctcgtaaaaaagaccatccgctacacaaacaccggcttatactccatccaattcctcctaagccacttgaggtccacatgagaatgatggggggtaaattgtattcgcgaaatgtcaaaggcatgttcaattgcagtggttgtgaccaattaggttttggtttcatgtacatatgcagcgaaaaaggctgccgattccaattagacgcacgatgcgcttcccttccggatccttttatacatggaagccattcacatgagctcttctttaatctcacaaagggagaatgcatggggtgtgagtctagtcattgttcaccttattcccttgagtgtatggaatgcaagtcattcttgggcctaaaatgcgctactttgccaagtatgacacactacaagcacgataaacatccactcgctctttgctacggggaagaagatacaacaaatgctcaatattggtgcgacatatgtgaggcgaaattagatgcagaagagtggttctatacatgcaatgattattgcaatgtcacggttcatgttagttgcttactgggaaacccaatcttcttgaagccaacgtccttctacataaaacaaaaacgttcaacggtctcagttattcgtaacaatgataacactcgagcaatttgctataggtgtgatcgtcgttccacacaaccctttttctttcggtattcagatttggtgtcttcgtgttcttttaattgtttgtgggatagagtacttaaaattatatag

SEQ ID NO: 1104 - protein, 679 aa, Arabidopsis thaliana
MEEITLKLSSRAILVCRQSDPSQSTHLLSRRYGGQRMSKCLICRTKKHHRTKYHLHCDTCDYDIHKSCYLLPRCRSMPLTRPHTLREGNDYHSSCDTCGDEVSENDRSYHCPTCEMCYHKVCNLYPHEIRHPFHAQHPLKLTFSSDSSFTDLKELPASWQEEPSDSETEDSDASDDVSSDSSISDDVSSDSSISDLKCKCCQTNLQEVYYHCSICKFNLNLTCARNPPLSTISHLKSHEHPLSIFPRRIPLPCDACGLSLENTNDYVYACLSCNLMVHMACIFLPRVIKITRHQHRLSLSPSLPSGIYPCGVCRLTIDVTYGQFSCNRGCHYAVHSKCAIEERIWDGKDLDGVPEEPDEDVEPFERIDDKTIQHFSHEHYLRLNIRNGVFDADSFCQACIIPILESESFYGCTQCSFLLHEACASFPRKKDHPLHKHRLILHPIPPKPLEVHMRMMGGKLYSRNVKGMFNCSGCDQLGFGFMYICSEKGCRFQLDARCASLPDPFIHGSHSHELFFNLTKGECMGCESSHCSPYSLECMECKSFLGLKCATLPSMTHYKHDKHPLALCYGEEDTTNAQYWCDICEAKLDAEEWFYTCNDYCNVTVHVSCLLGNPIFLKPTSFYIKQKRSTVSVIRNNDNTRAICYRCDRRSTQPFFFRYSDLVSSCSFNCLWDRVLKII

SEQ ID NO: 1105 - DNA, 2445 bp, Arabidopsis thaliana
  CDS (1)..(2445)
atggattccatcggtagatttcatgagacagaaactgatgataaactatatcagcagcttgtatattatcacccaaaatacacacccataccacaaacaaaaagcccaacctcctctcataaaacagccagccacgatctcctttttcaaccactttttttatgtcctcatccacgtgttactaaacaactttctgattctatcacttttccaatcagtaattcccctgaatacatcgtctctgcaacaaaaagtgatcaaaagtatgaagatcattcactactccctttgttttggtgcaacaataaagaaatcgatgtggatggtgggtgcgatatatgcagcggctcaaattttggcacagactattatttatgtgtccactgtgatagtatataccacaaagaatgcgtccaatctccattcaaaattgagcacccataccatccggagcactctctacaactttcctatcttgaccttaatgctcgcattatggagtgtttttgttgtggaagaagagcaacatatctggtatattactgtaccatatgtgatgttctaatgcatacagtgtgtgcgatgaagtcgatacccttaggtggatttcacgagttggaaaacaatggtaaactattttttgtatatcatcacccaaaataccaacccataccacaaacaaaaagcccctcctctgataaaacagccaaccacgatctcccatttcaaccacttttcttatgtcctcatctacgtgttactaaaaattcttctgattctctcacttacccaatcagttattcccctgaatacatcgtctctacaacaaaaagtgatgaagatttgtcagtactccctttgttttggtgtaacaataaagaattcaatgttgatggtgggtgcgacatatgcagcggctcaaattttggcacagactattatttctgtgtctactgtgataaaatttatcacaaagaatgcgtgcagtctccaatttcaatcaaacacccttatcatcctgagcattctttgcagctttcctatcgcctacctagtgctcccgatatagagtgtttatgttgtggaacaacagctacagatctagtatatggttgtaccatatgtgaagctgtaatgcatacaccatgtgcaatgaagtcgataccttttgttatcgaccaaccaaaaagccatgaccattccctcactctttttccgagacaagcttccttaacttgcaacgtttgtggtttactcagaaaaaactatcccacctttgtttgtcttagatgcaactttgttgctcataaagactgtatgtattctccacacatcatcaagatttcacgtcaccatcatcgtatctcctacactgcttctctccaatccgaagaatggtcttgtggagtttgtcgtaaaagtattgacggtgattatggtgcatatacttgtgaaaaatgtaaggattatgttgttcacgtaagatgtgctctacggaaagatgtgtgggatggagttgaacttgaaggtgtaccagaagaagatgatataacaaaagatgtcgggccgttcgagataatatctgaaggagtgatacttcattttcttcatgaccatcatctccaacttgaggttagcatattatatgatgaagagaagttttgtcaagcatgtgtcattcctatctatgaaggtaatcattacatttgtgtggaatgtgacttcaccatccatgaaatatgcgcaaaagatcggcgaagaatacaacatgcgttacatcctcatccacttacattaaatgccgtgagtaaatatgatacgggcgacttcgagtgcaatgcttgtgttcgtaattctggtggctttgtctatatgtgttcgagaaaggaatgcaacttcgatctagatgtacgatgcgcttcaatttctgaaccgtttaatttccaaggtcatgaacattcattgttcctagctatagacccaagcgaaaaacccatttgtcagatgtgcaaatcagagagccatataccattaaattgcattaaatgcgattttgttgtatgtatcaagtgtgcgacgttaccatttaaagcaaagtataagcatgacagacactctctcacaattctgtggggagaagaggtatgtggaaaagattggtgtgaggtgtgtgagcgtaatttaggagatacagacacaaaagtgttctattggtgcaacgagtgctgcactactcttcatattgaatgcttatatggggaaatcctatatctaaaacttggtaagtatatttttgatagtggtgggaaagagttccaaattcttgggaaagctacttcttctagaccattttgcaatatttgcaaaaaccgttgtcaaggcaaaatatttacgagagataatcgcatagcatgttctttgatatgcgccagtgacattgtttaa

SEQ ID NO: 1106 - protein, 814 aa, Arabidopsis thaliana
MDSIGRFHETETDDKLYQQLVYYHPKYTPIPQTKSPTSSHKTASHDLLFQPLFLCPHPRVTKQLSDSITFPISNSPEYIVSATKSDQKYEDHSLLPLFWCNNKEIDVDGGCDICSGSNFGTDYYLCVHCDSIYHKECVQSPFKIEHPYHPEHSLQLSYLDLNARIMECFCCGRRATYLVYYCTICDVLMHTVCAMKSIPLGGFHELENNGKLFFVYHHPKYQPIPQTKSPSSDKTANHDLPFQPLFLCPHLRVTKNSSDSLTYPISYSPEYIVSTTKSDEDLSVLPLFWCNNKEFNVDGGCDICSGSNFGTDYYFCVYCDKIYHKECVQSPISIKHPYHPEHSLQLSYRLPSAPDIECLCCGTTATDLVYGCTICEAVMHTPCAMKSIPFVIDQPKSHDHSLTLFPRQASLTCNVCGLLRKNYPTFVCLRCNFVAHKDCMYSPHIIKISRHHHRISYTASLQSEEWSCGVCRKSIDGDYGAYTCEKCKDYVVHVRCALRKDVWDGVELEGVPEEDDITKDVGPFEIISEGVILHFLHDHHLQLEVSILYDEEKFCQACVIPIYEGNHYICVECDFTIHEICAKDRRRIQHALHPHPLTLNAVSKYDTGDFECNACVRNSGGFVYMCSRKECNFDLDVRCASISEPFNFQGHEHSLFLAIDPSEKPICQMCKSESHIPLNCIKCDFVVCIKCATLPFKAKYKHDRHSLTILWGEEVCGKDWCEVCERNLGDTDTKVFYWCNECCTTLHIECLYGEILYLKLGKYIFDSGGKEFQILGKATSSRPFCNICKNRCQGKIFTRDNRIACSLICASDIV

SEQ ID NO: 1107 - DNA, 2232 bp, Arabidopsis thaliana
  CDS (1)..(2232)
atggattttgagggggaggtcatatcagccatttctcaactaatctctatcgacgacccttgggaagtggataatggggatgcgaatacggagatcattgcacgcgttattgagataagctacgttagtaacacattctgcgaatatgctatgttactaacgcagcagaaggcggagtcggagctcatgttacttattactcaaaccatatctttctacaactctatggatttggattcccagccggagccgctaaggaagctcatatcatttatcgctaaaaaagcagatctcgactactatgttgatcccttgttggagcaggatttggaggtcttgccactctttggtaaaacattaagtcttgagccagagccagagcttatatcactcatccgtaaaatagtctccctcgtcatctctatggatccaaagtggaagaaacttatttccttatgtcctcaagtagccgtaagattggaaaatggtatattacacgtggatgaagaattcgtgtgggaaaccaatgacaagtggtgttgtttccctttattctggctgaagttcaggtcaccagaacaagatgctacccattttttctgccgaggttgcaacggcaagaaccataacgaaaacaacaaggctccagttgagatcaaacaccctcttcatccaagacattctcttcggcttgctttgttgcgaaagtctaatgaaacgaggcagtgctattgttgtgatgtaagtcttcaagagatattttattattgctcagcttgcgactatgctatgaacatagcttgtgtggagaaacctccggtctattctatagaccattccaaatggcatgagcatactcttgctctgtttccaagacagactccctttgcttgcagcctatgttcgttgacacatacaagctgtcctttctatatatgtcccccttgtgactttgtggctcatcaaaggtgtatcagcttaccgcgtgtcataaggatatctcgccatcctcatcgtatctcttttaaccattcttttggtcaaggagattggtcttgttgtgtttgtcgtagaaagatcgacaatgattacggtggttattcttgcatcaaggaaggttgttcatatgtggctcattcaaaatgtgccacacaaaagaacgtgtgggacggtaaagaacttgagggaatactagaagaagatgaaaaagttgaaccgccgtttgtgaggataagtgatcgaatcatcgagcattttagtcatcaacatcatcatttgagacttgatgagaacacgggtagagattacgacgtgaataagttgtgtcaagcatgcatcatgccaatctattccggtaacttctattcatgtatgcaatgtgattatattctccacgaaaaatgtgcaaatctctctcgcaaaatgcatcatccgatacatccacatatgctcactctcaaagtaggatctcggggtcttgtggaacatagtgttgatccatgttcagcttgtccttggaagtgcaaagccggtttcttctatgagtgtgaacaacaggataaagatgaatatcttttcaagctacatgtgcagtgcgccacaatgtctgagccattagtccataaaagtcatgaacattctttattcctaacatcgaaaccagaagagcaaagaagatgttccgtttgcaaaaagttagaacagttttcaacaaacgaaacattcaattgcattgagtgtgactactttgctttgtgttttggatgcgccactttacctcaagaggtaaggtatgagcatgataaacatatgctcactctttcttatggcgaggagacatgcatcacgacttattggtgtgatatttgcgagcaagagatagacccaaaggagcggttttatacgtgtggtgagtactgttgcgtcaccctacacattgaatgtctgcttgggcaggatttatacgtgaagcctggttcatcttggataagcttctccttcaatggagagaagatatatgttcgggccaacgatcatcatatgactcgacctatttgctctcattgcaagaagcgttgtccacacaaaatagttttggagtcgtctggttcaaaattttgttccacatcttgtgttggttattttttgtctacaaaggtgaacacagctggtcatcgcgaatatctacaacggagaggctacggaaattatgagttctcagcactgacgtag

SEQ ID NO: 1108 - protein, 743 aa, Arabidopsis thaliana
MDFEGEVISAISQLISIDDPWEVDNGDANTEIIARVIEISYVSNTFCEYAMLLTQQKAESELMLLITQTISFYNSMDLDSQPEPLRKLISFIAKKADLDYYVDPLLEQDLEVLPLFGKTLSLEPEPELISLIRKIVSLVISMDPKWKKLISLCPQVAVRLENGILHVDEEFVWETNDKWCCFPLFWLKFRSPEQDATHFFCRGCNGKNHNENNKAPVEIKHPLHPRHSLRLALLRKSNETRQCYCCDVSLQEIFYYCSACDYAMNIACVEKPPVYSIDHSKWHEHTLALFPRQTPFACSLCSLTHTSCPFYICPPCDFVAHQRCISLPRVIRISRHPHRISFNHSFGQGDWSCCVCRRKIDNDYGGYSCIKEGCSYVAHSKCATQKNVWDGKELEGILEEDEKVEPPFVRISDRIIEHFSHQHHHLRLDENTGRDYDVNKLCQACIMPIYSGNFYSCMQCDYILHEKCANLSRKMHHPIHPHMLTLKVGSRGLVEHSVDPCSACPWKCKAGFFYECEQQDKDEYLFKLHVQCATMSEPLVHKSHEHSLFLTSKPEEQRRCSVCKKLEQFSTNETFNCIECDYFALCFGCATLPQEVRYEHDKHMLTLSYGEETCITTYWCDICEQEIDPKERFYTCGEYCCVTLHIECLLGQDLYVKPGSSWISFSFNGEKIYVRANDHHMTRPICSHCKKRCPHKIVLESSGSKFCSTSCVGYFLSTKVNTAGHREYLQRRGYGNYEFSALT

SEQ ID NO: 1109 - DNA, 1962 bp, Arabidopsis thaliana
  CDS (1)..(1962)
atggaacctgagatggtgcgactacccattcatgagcactggctgacacctgcaagagataatcggtggggtaaatgttgtggactccaattcaaaactatcagtgatggctacaactgcagaaaatgtcgttatttcttccataagagttgcagcaactgccctaaagagatcaaccacccttctcacaagtgtgataagaatctttctcttattacaaattttgccagctggagtgtgagatgccgtacatgtaaagagacaatccagccctatatccagaactatgaatgtcagcgctgtgaattcaacatccatttggattgtttcaagtacccaccaccgaaagtcattgattttccccagaaccatgaccacaaactcaagctagagatggtgagaagctccttcacctgctttacttgtgggaagggaggcagtggatatccttacaaatgccatgaatgcgatttggcattccatgtggattgcgaaaagtatggagcagaggtaaaccacccttcccactccttacacacactaaaactcatcactggtaaaccaccggcttatactgatgggaattgtagtttatgtgggaaaaagatttttgacgaaatgttttatcactgttccgcttgtaactttactttggatttgcgatgtgtttctcttccaccaccactaaatcttcacgaccaaaacacccacaaccatgaactaacccttatgccaaaattgatctcttttacttgcaccacttgcggcctccatggagatcgaagcccatatgtctgtcttcaatgcaatttcacttcccataacaattgctctggatttccatgggtcatcaatatcaaccgccatgatcatcgcgtttctcgcacttctcttcttggtattattgattcagtatgtggtgtttgtcgtaagaaaatggattggagttgtgggggatattcttgtaagaggtgttctgagtctacatttcataccaaatgcgctactagagaagatgtttgggatggaatagagatgaaagatgagcctgaagaagatgaacctatggaaccattcgaggtgattagtgaaggtataatacgacatttcagccatatagagcataacttaagactggacaagtctggtacctttgttgaggagagaagttgcaaggcatgtgcttatcctatctatcatgatcccttctacagttgtatgagttgtgattttcttctacacgagaactgtgctaaacatcctacacgaaaacgtcatgtgctaagcaataaaccgtatattctacatgcatctcaacgtaactactctaagtgtaaggcttgtggagtattttttaattgtttcatatacggtacttttccgtttggattagatgtgcgatgtgcctccttttctgggtcacttgtccatccaagtcaccaacatcccttgttttacacatcaccaaaaggagtatgtagtgcttgcaacaaggaaacatctcacgtgctcagatgcgttgaagataagtgtggatacgccttggatttcaaatgcgctctattaccacatgaggtcaagcatagagtcgacgatcattttctctctttatgctatggtgaaagagatgcaagtggtaaatattggtgtgatatttgcgagaaagaaactgatccaacaaaatggttttacacttgtaaagattgtggggtaactttgcataccaattgtgtgctcggagatttccgaggcctggaaccggaaacaaatatagtattggatgatgaccggatgcagatgacactttacgagaccgttcgcaacaatagtatgtctcgaccagtttgttataaatgtaagtaccattgcattttccctatcatcttgaaagtcaccgacgaagataaatacttttgctctatcagttgctgtgacattaaaacccttcccttctacaactaa

SEQ ID NO: 1110 - protein, 653 aa, Arabidopsis thaliana
MEPEMVRLPIHEHWLTPARDNRWGKCCGLQFKTISDGYNCRKCRYFFHKSCSNCPKEINHPSHKCDKNLSLITNFASWSVRCRTCKETIQPYIQNYECQRCEFNIHLDCFKYPPPKVIDFPQNHDHKLKLEMVRSSFTCFTCGKGGSGYPYKCHECDLAFHVDCEKYGAEVNHPSHSLHTLKLITGKPPAYTDGNCSLCGKKIFDEMFYHCSACNFTLDLRCVSLPPPLNLHDQNTHNHELTLMPKLISFTCTTCGLHGDRSPYVCLQCNFTSHNNCSGFPWVININRHDHRVSRTSLLGIIDSVCGVCRKKMDWSCGGYSCKRCSESTFHTKCATREDVWDGIEMKDEPEEDEPMEPFEVISEGIIRHFSHIEHNLRLDKSGTFVEERSCKACAYPIYHDPFYSCMSCDFLLHENCAKHPTRKRHVLSNKPYILHASQRNYSKCKACGVFFNCFIYGTFPFGLDVRCASFSGSLVHPSHQHPLFYTSPKGVCSACNKETSHVLRCVEDKCGYALDFKCALLPHEVKHRVDDHFLSLCYGERDASGKYWCDICEKETDPTKWFYTCKDCGVTLHTNCVLGDFRGLEPETNIVLDDDRMQMTLYETVRNNSMSRPVCYKCKYHCIFPIILKVTDEDKYFCSISCCDIKTLPFYN

SEQ ID NO: 1111 - DNA, 2181 bp, Arabidopsis thaliana
  CDS (1)..(2181)
atggattcggagtcggagctcatatcgatcatttctcaaatcttagctctcactagatctcacgttgaggaggaggaggaggctgaggcagagtcaaagttcttattattcattactcgaataatttctatagttagctctcttaacttgaatgtgcagccagagcccggggtcatatcgctcatttctcaaatgatctcgctaagcagctctatatcagactccaagccggagttggagctcatatcacttgtgaatcatatgatctctctcgtcaactctatagattcggaaccggagccggatccagacctcatgtcactcattactcaaatattctctcatctcgactttatggattcagatttggagctcaagtcactctttactcaaatagtctctctcgttagttctatggagtctgattcagagccggagccggaacgggagacgaagcagccaatatgcttggcccctcaatttaaactagaattatcaaacgggaaaaatcttgtgacgggatttgtcaagcgtgatggtagaaaatatgaccccgagtactgtaaccccgagtactggagggtactaaggttaacaacaggcgaaatttctcattttctctgcccaagttgcgaaggtgataatcatgaagaatatgagaaggctccacttgaggtcaaacaccctcttcatccaaaacattctcttcagcttatcttggaaaactcgtggggatgtcgaaaaaagaaatgctattgttgtgatgaaatactcctatggatattttattactgttgggtttgcgattgtggtatgaacatagcttgtgtggagaaactaccgctcttatcaatacaccatccgaagtggcatgaacatacactttctctgtttccaatactcatatccttaacttgcaacgtatgtgccttggaccatttcaactgtcctttctatatatgttccccatgtgactttgtggttcatcaaagttgtatcaccttaccacgtgttataaggatatctcgccatctccaccgtatttcctttaccccttcatttgaacaaggagattggtcttgtggtgtatgtcgcaaaaaaatcgacaatgattgtgggggttattcttgcggaaacagcggttgtacgtatgtggctcattccaaatgtgccacacagagtaatgtttgggatggtgaagatcttgagggaaaaccagaagctattgatgaaataggagttaatccatttgtgaggataagtcttggaatcatacaacatttcagccatcaacaacattatctgagacttgatgataacacgggcagagactacgacgagagtaagctgtgtcaagcatgcatcacgccaatctattttggtaaattctactcttgtatggaatgcaatttcattctccacgaagaatgtgcaaatttttctcgcaaaatacaacacccgatacatccacatctgctcactttagtgacttccgcgaccgataaagccaacactcatgatttatgttcagcttgcccatggttgttcaccaccggtttcttctatgagtgccacagagaaggatgtcgttttaatctacatgtgcggtgcgggacaatttctgaaccattagttcatggaagtcataggcatcctttattcctaacatctaaaccaggagattggagaacatgtagtgtttgcaaagagtcaagccgttatgtcacacatgaaacatttaattgcgttcaatgtgtctttgctttgtgtttcaagtgtgctgctatacctcagaaggtgaggtataagcatgataatcatgtgctcattctttcttatgggaaggagatcgagacaagtaccatggcgtattggtgtgaagcttgcgagagaaaaataaatccgaaagggcagttttataattgtgatgagtatggttgtgtcaccctacacattgaatgtttgattgggaaggacttatatatgaagcccggttcatcttggttattcaaaggtagaaaggtacgtgttcttcgcaacaaccatcgtatgactagacctatttgtagggaatgtaaagatcgttgtccacacaaaatagtgttccgacgttctacattaaacttttgttccaccggttgtatgaggtcgaaggtttttagtctggagctttatcgttag

SEQ ID NO: 1112 - protein, 726 aa, Arabidopsis thaliana
MDSESELISIISQILALTRSHVEEEEEAEAESKFLLFITRIISIVSSLNLNVQPEPGVISLISQMISLSSSISDSKPELELISLVNHMISLVNSIDSEPEPDPDLMSLITQIFSHLDFMDSDLELKSLFTQIVSLVSSMESDSEPEPERETKQPICLAPQFKLELSNGKNLVTGFVKRDGRKYDPEYCNPEYWRVLRLTTGEISHFLCPSCEGDNHEEYEKAPLEVKHPLHPKHSLQLILENSWGCRKKKCYCCDEILLWIFYYCWVCDCGMNIACVEKLPLLSIHHPKWHEHTLSLFPILISLTCNVCALDHFNCPFYICSPCDFVVHQSCITLPRVIRISRHLHRISFTPSFEQGDWSCGVCRKKIDNDCGGYSCGNSGCTYVAHSKCATQSNVWDGEDLEGKPEAIDEIGVNPFVRISLGIIQHFSHQQHYLRLDDNTGRDYDESKLCQACITPIYFGKFYSCMECNFILHEECANFSRKIQHPIHPHLLTLVTSATDKANTHDLCSACPWLFTTGFFYECHREGCRFNLHVRCGTISEPLVHGSHRHPLFLTSKPGDWRTCSVCKESSRYVTHETFNCVQCVFALCFKCAAIPQKVRYKHDNHVLILSYGKEIETSTMAYWCEACERKINPKGQFYNCDEYGCVTLHIECLIGKDLYMKPGSSWLFKGRKVRVLRNNHRMTRPICRECKDRCPHKIVFRRSTLNFCSTGCMRSKVFSLELYR

SEQ ID NO: 1113 - DNA, 2103 bp, Arabidopsis thaliana
  CDS (1)..(2103)
atgagatcacttatatcactttttagtcaactaatctctttgatcaactctatggatcttgattcgcagccggagccggagccggagtcggggatcatattcttcatataccaactgatctctttcgggagatctctatcaggttcgaagcctgagaggcagatcatattactcgtgactgaaatgatctctctcatcagctctactgatccgaagcaggaaccggaacctgaggtcatgtcactgaccagtaaaacattatcaagtttatactcactggatccttattcggagctccaactactcattgctaaaacattctctttcgtcgaactaatggattctgattcggatcctgaggctgacgcggaacgtgagtcggagcggctaatttccttatgccctcagtttgaagtagaacttgtgcaaggaaaatttcgtgtggcgggaaaattcgagtggaggaggagagaaaaggggaagtgtaaccccggaaaccggaaggtattaaggttaagaaaaggagcagagattactcatttcttttgccggaattgcattggagaggaacatgacgtatgtgacaaggcaccacttgaggtcaaacatcctcttcatccaagacactctcttcaacttgttttgtggtgggtgtccaacttccaaaaaagaaaatgctattgttgtgatgaagaactcttatggatattttatttttgctcggcttgcgattgtggtatgaatatagcttgcgtggagaaaaaaccactcttatcgatagaccatccggagtggcatgaacatatactttctctgtttccaagacaagctcccttaccttgcagtgtgtgtgccttgcctcattcaaggtctactttttatatatgttccccgtgtcaatttatagttcatcaaagttgtatcaacttaccaagcgtcataaggatatctcgtcatctccaccgtatctcttttatccgttctttcgaccaaggagattggtcttgtggtgtttgtcgccgaaaaatctacaatgattacgggggttattcttgcatcaatgacgattgttcgtatgcagctcattcaacttgtgccacacagagcaatgtctgggatggtaatgaacttaagggaaagccagaagaaattgatggagaaggagttgagccatatgtgagtaaagggaatggaattatacaacatttcagccatcaacaacattatttgagtcttgatgaaaacactggtagagataacaacgagaataagttgtgtcaagcatgcatcacgccaatatactccggtaaattctactcttgtatgaaatgcaattttattctccacgaagaatgtgcaaatttttctcgcaaaatacatcacccgatacatccacatatgctcactctaatgactcccactaccgatagaatcaacattgagaattcatgttctgcttgtccctggttgtgcacaactggtttcttctatgagtgcgatagagaaggatgtcgtttcattctacacgtgcagtgtagcaaaatttctgaaccattagttcatgagagtcatatgcatcctttatttctaacatccagaccaggagagcggaaacattgtgacgtttgcaaaaagccaagagatacttctacaagtgaaacattcaactgcaatgagtgcgtcttttctttgtgtttcaagtgtgctgctataccttataaggtgaggtataagcatgataagcatatgctcactctttcttatgggaatgagacaagtatgttgacgcattggtgtgaagtttgcgagggaaaaataaatcccaaataccggttttataggtgtgatgagtattgttgtgtcaccctacacatggaatgtctgcttgggttggacttatacatgacgccaggtttatcgttgttccactccggtgctacagacatagatgttttgcccaacaatcgtatgtctcgacctatttgcaagacctgtaacaagcgttgtccattcaaagtagtcttccagtgttctggatttaaattttgttccaggttttgtttacttcgtggcatttggacaggtttgaccaaaatagcttaa

SEQ ID NO: 1114 - protein, 700 aa, Arabidopsis thaliana
MRSLISLFSQLISLINSMDLDSQPEPEPESGIIFFIYQLISFGRSLSGSKPERQIILLVTEMISLISSTDPKQEPEPEVMSLTSKTLSSLYSLDPYSELQLLIAKTFSFVELMDSDSDPEADAERESERLISLCPQFEVELVQGKFRVAGKFEWRRREKGKCNPGNRKVLRLRKGAEITHFFCRNCIGEEHDVCDKAPLEVKHPLHPRHSLQLVLWWVSNFQKRKCYCCDEELLWIFYFCSACDCGMNIACVEKKPLLSIDHPEWHEHILSLFPRQAPLPCSVCALPHSRSTFYICSPCQFIVHQSCINLPSVIRISRHLHRISFIRSFDQGDWSCGVCRRKIYNDYGGYSCINDDCSYAAHSTCATQSNVWDGNELKGKPEEIDGEGVEPYVSKGNGIIQHFSHQQHYLSLDENTGRDNNENKLCQACITPIYSGKFYSCMKCNFILHEECANFSRKIHHPIHPHMLTLMTPTTDRINIENSCSACPWLCTTGFFYECDREGCRFILHVQCSKISEPLVHESHMHPLFLTSRPGERKHCDVCKKPRDTSTSETFNCNECVFSLCFKCAAIPYKVRYKHDKHMLTLSYGNETSMLTHWCEVCEGKINPKYRFYRCDEYCCVTLHMECLLGLDLYMTPGLSLFHSGATDIDVLPNNRMSRPICKTCNKRCPFKVVFQCSGFKFCSRFCLLRGIWTGLTKIA

SEQ ID NO: 1115 - DNA, 1884 bp, Arabidopsis thaliana
  CDS (1)..(1884)
atggacttgttcggagaatttcacaaagtggaattcaatgggaaaccatttcttgtataccgcaacgttataaaaccattaccacaaacacaaacctcaaactcctttgataaacaatccattgattccgtctacgatctccctcctcaacctcttttcttatgccctagactccgaacccgtatattattgaattctcttgatgatgaggtggaagatgaggtaactaatcatatcctttccaagtacagttcttcccctctctttgatgagaccagcaacaatcatcatgtactccctctgttttggtgcaacaacaaagaagttgatccggaagcagaagaaggcgatgagtgctattcctgctctatccaaaccatcggtacagactattatttttgtgccacgtgtgataaaaggttccacaaagaatgcgtcgagtgtccacttgagattagttatcctacccacaccaaacattctctccaactcttctattctaaatatagatttgaccattgcatctactgtagaaaaagagcaacctatatgatttatttttgtgctctttgcgacagttatatgcatgtcctttgtgctcagtcaaaaatacccttttttatagaccagccaaaaagacatgaccatactctcacccttttccctagacaagcttccttaacctgcaatatttgtggtttgataaataaactccatttcacctacgtttgccctatatgcgatttcgtagcccatagtgattgtatttatatcccacaaaccataagaatatcccgtcaccaccatcgtgtctcttttatttcttcccttccttttgaagaaaagtcttgtggagtttgccgtcaaatggttgatagtgattatggtgcatacacttgcaatgtgtgtagtggctatgtcgttcacgtaagatgtgcattacgtaaggatatatgggatggtaaagaactcgcggaagtaccagaagagttagaagacgttgagtccttcaggaagatagctaatggagtaatactccatttttctcatcgccatcatctgaaatttgacataagtggagttttcgttggaaacaaattttgtcaagcgtgtgtccttccaatcaacgaaggaaatgtttatgtttgtgtggaatgtgatttcatcctacacgaaacatgtgcatatgctccacgtaaaaaggtccatccattacatccccatccccttacactaaaggttgatcatggagacgctttattccaatgcagtgcttgtatgcgtaagagtaatggtttcggatatgattgtactagccgaacttgttactacatactagatgcagtgtgtgcctcgactgctgagccgttcaattatcaaggccatcgacatcccttattcctatcgttagacccaaaagagaagccaatgtgccacatttgcaagtcaacgaaaaataagaaggtacttaactgcattgaatgtgactttattatatgttttgaatgcgccaccttaccatacatggtaaggtacaagcatgacgaacattacctcacattttgtcatggagatgaggcaaatggatcagattggtgtgaattatgtgagggaaagttagcaattggaggaaaagaagggttctataagtgcaaagattgctgcaccacgcttcatattaattgcttacttggtcctgatccatattacaaggctggtcaaacttacgaaattggtgaaattgcaattcttttgcaacacaacaattctgcttctcggcctatttgctatttttgcaatatccgttgtccgtatccaatatttttggtagccacagtggataggattgcttatattctatgttctagtaaacacttgaagtag

SEQ ID NO: 1116 - protein, 627 aa, Arabidopsis thaliana
MDLFGEFHKVEFNGKPFLVYRNVIKPLPQTQTSNSFDKQSIDSVYDLPPQPLFLCPRLRTRILLNSLDDEVEDEVTNHILSKYSSSPLFDETSNNHHVLPLFWCNNKEVDPEAEEGDECYSCSIQTIGTDYYFCATCDKRFHKECVECPLEISYPTHTKHSLQLFYSKYRFDHCIYCRKRATYMIYFCALCDSYMHVLCAQSKIPFFIDQPKRHDHTLTLFPRQASLTCNICGLINKLHFTYVCPICDFVAHSDCIYIPQTIRISRHHHRVSFISSLPFEEKSCGVCRQMVDSDYGAYTCNVCSGYVVHVRCALRKDIWDGKELAEVPEELEDVESFRKIANGVILHFSHRHHLKFDISGVFVGNKFCQACVLPINEGNVYVCVECDFILHETCAYAPRKKVHPLHPHPLTLKVDHGDALFQCSACMRKSNGFGYDCTSRTCYYILDAVCASTAEPFNYQGHRHPLFLSLDPKEKPMCHICKSTKNKKVLNCIECDFIICFECATLPYMVRYKHDEHYLTFCHGDEANGSDWCELCEGKLAIGGKEGFYKCKDCCTTLHINCLLGPDPYYKAGQTYEIGEIAILLQHNNSASRPICYFCNIRCPYPIFLVATVDRIAYILCSSKHLK

SEQ ID NO: 1117 - DNA, 1542 bp, Arabidopsis thaliana
  CDS (1)..(1542)
atggattgcggtttttgcgaaggcgataaggtcggtacatgctattattactgtgtcacgtgtgatgaaaggtaccacaaagaatgtgttgagtctccacttgagatcacttatccttcccaccctcaacattctctccaaatttacctttctacaaaaccatttgagcattgcatcttgtgctcaagaaaggcacataatattatttattattgtgatgtctgtgatatttacatgcatgtgctttgtgctcaggcgacaataccctttttcatagaccaaccaaaaaggcatgatcatacactcacccttttccctagacaagcttccttaacctgcaatgtttgtggtttagttaataaacttcatctcacctacgtctgctccatatgcaattttgcagcccatagtgattgtatccatatcccacaaaccataagaatgtctcgccacgaccatcgtatctctttcacttcttctcttccattaggaatatggtcttgtggagtttgccgcaaagagattgatggtgattatggtgcatatatttgcaatatttgtagcggctacgctgttcacacaagatgtgcattgcgactcgatatatgggatggcattgatctcgaaggagtaccagaagaagatgaagaagttgagccattcgagaggatatcagatggaataatactccatttttctcatggttgtcaattgaaacttacgacctatgaagttaacggcgaagaaaagttttgtcaagcgtgtgtccttccaatcaatgagaagaatttgtatgtatgtgtggaatgtggcttcatcctacatgaaacatgtgcagatgctccccgcaagaagttccatccattgcatccccatccacttaaacaaagagttgctacagctgaccttgaacgtggattctcctatcttgcatgtaagcgcctaagtaatagtttcagatatgagtgtgacaaagagggttgtgactgcgttcttgatgtagtatgtgcttcggtttctgagccgtttgattatcaaggtcatccacaccccttatttctagctttagaccccaaagaaaagccaatttgcaacatttgcaagtcaaccaaggttcataaactattgaactgcattgaagtcgagtgcaattttgttatatgttttacgtgtgccaccttaccatacatggtaaggtataagcatgatgaacattacctcacattttgtcgtggagatgaggcaggtggctcagactggtgtgagttatgcgaaggaaaattagcaattggaggaaaagaagggttctataagtgcacttattgttgtaccacgcttcatattaattgcttgcttggtccagatccatatttgaagcctgatcaaactatcccaacggatcaaattgaggtggttttacaacgcaacaattctgcatctcgtcaaatttgcagcaaatgcaatattcgttgtccgtatccaacatttgcagtatacacaaaggaaatggtttctcatattaggtgtgctctaacatgttaa

SEQ ID NO: 1118 - protein, 513 aa, Arabidopsis thaliana
MDCGFCEGDKVGTCYYYCVTCDERYHKECVESPLEITYPSHPQHSLQIYLSTKPFEHCILCSRKAHNIIYYCDVCDIYMHVLCAQATIPFFIDQPKRHDHTLTLFPRQASLTCNVCGLVNKLHLTYVCSICNFAAHSDCIHIPQTIRMSRHDHRISFTSSLPLGIWSCGVCRKEIDGDYGAYICNICSGYAVHTRCALRLDIWDGIDLEGVPEEDEEVEPFERISDGIILHFSHGCQLKLTTYEVNGEEKFCQACVLPINEKNLYVCVECGFILHETCADAPRKKFHPLHPHPLKQRVATADLERGFSYLACKRLSNSFRYECDKEGCDCVLDVVCASVSEPFDYQGHPHPLFLALDPKEKPICNICKSTKVHKLLNCIEVECNFVICFTCATLPYMVRYKHDEHYLTFCRGDEAGGSDWCELCEGKLAIGGKEGFYKCTYCCTTLHINCLLGPDPYLKPDQTIPTDQIEVVLQRNNSASRQICSKCNIRCPYPTFAVYTKEMVSHIRCALTC

SEQ ID NO: 1119 - DNA, 1323 bp, Arabidopsis thaliana
  CDS (1)..(1323)
atgcatgtcttttgtgctcagatgaaaatacctttttttatagaccaaccaaaaagacatgaccataccctcaccctttttcctagacaagcttccttaacctgcaatatttgtggtttggtaaataaacttcatctcacctacatttgccctatatgcgatttcgtagcccatagtgattgtatctatatcccacaaaccataagaatatctcgtcaccaccatcgtgtgtcttttatttcttcccttccttttgaagaaaagtcttgcggagtttgtcgtcaaatgcttgacagtgattatggtgcatatatttgcaaagggtgtagtggctttgtcgctcacataagatgtgcactacgtagtgatatatgggatggaaaagaacttgaaggagtaccagaagaagtagaagaagatgacgttgaatccttcaagaggatagctgatggagtaatactccatttttctcatcgccatcatctgtattttgagataagtggagtttacaatggaaacaagttttgtcaagcttgtgcccttccagtcaatgaagggaatttgtatgtatgtgtgggatgtgatttcatcctacacgaaacatgtgcagatgctccacgtagaaaggtccatccattacatccccatccccttaaactaattttttatgaagacaattgcttccactgcaaagcttgttggcgtacgagtactgcttttggatataggtgtatcaaccacaattgcaagtacatgatagatatagtgtgtgcctcgactgctgagccgtttgattatcaaggccatcgacatcccttattcttatcgttagacccaaaagagaagccaatgtgccacatttgcaggtcaacaaaagataagaaggtacttaactgcattgaatgtgactttattgtatgtttcgaatgcgccaccttaccatacatgataaggtataagcatgatgaacattacctcacattttgtcatggagatgaggcaagtgactcagattggtgtgaattatgtgagggaaagttagcaattggaggaaaagaaggattctatgagtgcaaagattgttgtacgacacttcatattaattgcttacttggcccagatccatatcttatggttggtcaaaggctcccagttcctaacggtgagattttttttcgacacaacaattatactactcggcctttttgctcgatatgcaatattcgttgtccgtatccaacatttgtttcatacataaaggatatgtttatatcttatattctatgttctagtaagcacttgaagacgagataccatcattga

SEQ ID NO: 1120 - protein, 440 aa, Arabidopsis thaliana
MHVFCAQMKIPFFIDQPKRHDHTLTLFPRQASLTCNICGLVNKLHLTYICPICDFVAHSDCIYIPQTIRISRHHHRVSFISSLPFEEKSCGVCRQMLDSDYGAYICKGCSGFVAHIRCALRSDIWDGKELEGVPEEVEEDDVESFKRIADGVILHFSHRHHLYFEISGVYNGNKFCQACALPVNEGNLYVCVGCDFILHETCADAPRRKVHPLHPHPLKLIFYEDNCFHCKACWRTSTAFGYRCINHNCKYMIDIVCASTAEPFDYQGHRHPLFLSLDPKEKPMCHICRSTKDKKVLNCIECDFIVCFECATLPYMIRYKHDEHYLTFCHGDEASDSDWCELCEGKLAIGGKEGFYECKDCCTTLHINCLLGPDPYLMVGQRLPVPNGEIFFRHNNYTTRPFCSICNIRCPYPTFVSYIKDMFISYILCSSKHLKTRYHH

SEQ ID NO: 1121 - DNA, 1884 bp, Arabidopsis thaliana
  CDS (1)..(1884)
atggacttgttcggagaatttcataaagtggaatttaatgggaaaccatttcttgtataccgcaacgttataaaaccattaccacaaacacaaacctcaaactcctttgataaacaatccattgattccgtctacgatctccctcctcaacctcttttcttatgccctagactccgaacccgtatattattgaattctcttgatgatgaggtggaagatgaggtaactaatcatatcctttccaagtacagttcttcccctctctttgatgagaccagcaacaatcatcatgtactccctctgttttggtgcaacaacaaagaagttgatccggaagcagaagaaggcgatgagtgctattcctgctctatccaaaccatcggtacagactattatttttgtgccacgtgtgataaaaggttccacaaagaatgcgtcgagtgtccacttgagattagttatcctacccacaccaaacattctctccaactcttctattctaaatatagatttgaccattgcatctactgtagaaaaagagcaacctatatgatttatttttgtgctctttgcgacagttatatgcatgtcctttgtgctcagtcaaaaatacccttttttatagaccagccaaaaagacatgaccatactctcacccttttccctagacaagcttccttaacctgcaatatttgtggtttgataaataaactccatttcacctacgtttgccctatatgcgatttcgtagcccatagtgattgtatttatatcccacaaaccataagaatatcccgtcaccaccatcgtgtctcttttatttcttcccttccttttgaagaaaagtcttgtggagtttgccgtcaaatggttgatagtgattatggtgcatacacttgcaatgtgtgtagtggctatgtcgttcacgtaagatgtgcattacgtaaggatatatgggatggtaaagaactcgcggaagtaccagaagaattagaagacgttgagtccttcaggaggttagctgatggagaaatattccatttttatcatcaccatcatctgaaatttgacataagtggagtttacgttggaaacaaattttgtcaagcgtgtgtccttccaatcaacgaaggaaatatttatgtttgtgtggaatgtgatttcatcctacacgaaacatgtgcatatgctccacgtaaaaaggtccatccattacatccccatccccttacacaaaagggtgatcatgtaaacgctttcttcaaatgcagtgcttgtatgcgtaagagtaatggtttcggatattcgtgttataaccgaaattgttactttaaactagatgcagtgtgtgcctcgactgctgagccgttcaattatcaaggccatcgacatcccttattcctatcgttagacccaaaagataagccaatgtgccacatttgcaagtcaacgaaagataagaaggtacttaactgcattgaatgtgactttattatatgttttgaatgcgcaaccttaccatacatggtaaggtacaagcatgacgaacattacctcacattttgtcatggagatgaggtgagtgactcagattggtgtgaattatgtgagggaaagttatcaattggaggaaaagaagggttctataattgcaaagattgctgcaccacgcttcatattaattgcttacttggcccagatcaatattataaggctggtcaaacttacaaaattggtgaggttgatattagtttgcaacacaacaattctgcttctcggcctatttgctgtatgtgcaatatccgttgtccgtatccaatatttttggtagccacagtggataggattgcttatattctatgttctagtaaacatttgaagtaa

SEQ ID NO: 1122 - protein, 627 aa, Arabidopsis thaliana
MDLFGEFHKVEFNGKPFLVYRNVIKPLPQTQTSNSFDKQSIDSVYDLPPQPLFLCPRLRTRILLNSLDDEVEDEVTNHILSKYSSSPLFDETSNNHHVLPLFWCNNKEVDPEAEEGDECYSCSIQTIGTDYYFCATCDKRFHKECVECPLEISYPTHTKHSLQLFYSKYRFDHCIYCRKRATYMIYFCALCDSYMHVLCAQSKIPFFIDQPKRHDHTLTLFPRQASLTCNICGLINKLHFTYVCPICDFVAHSDCIYIPQTIRISRHHHRVSFISSLPFEEKSCGVCRQMVDSDYGAYTCNVCSGYVVHVRCALRKDIWDGKELAEVPEELEDVESFRRLADGEIFHFYHHHHLKFDISGVYVGNKFCQACVLPINEGNIYVCVECDFILHETCAYAPRKKVHPLHPHPLTQKGDHVNAFFKCSACMRKSNGFGYSCYNRNCYFKLDAVCASTAEPFNYQGHRHPLFLSLDPKDKPMCHICKSTKDKKVLNCIECDFIICFECATLPYMVRYKHDEHYLTFCHGDEVSDSDWCELCEGKLSIGGKEGFYNCKDCCTTLHINCLLGPDQYYKAGQTYKIGEVDISLQHNNSASRPICCMCNIRCPYPIFLVATVDRIAYILCSSKHLK

SEQ ID NO: 1123 - DNA, 1950 bp, Arabidopsis thaliana
  CDS (1)..(1950)
atggacttgttcggagaatttcgtaaggtggaaatcgatgggaaaccatttcttgtataccacaaagttatgaaaccattaccacaaatacacaccccaaactcctccgatgaagaaaccaccatcgaaaaaccattatcaatccaaaacgaagaaacttcctccgatgaagaaaccattgactccggtgacaacctacctcttccacttcttttcgcatgccctattgtacgactcacctcaacagtgattattgacaatattacattacaggatgatcaagggaagtcagtagaacactttttcaatctcaagacatcccccttccatggtgacaatacgtcagttgatcatgatcccgtactacctctgttttggtgcaacaataaagaagctgatccagagaacgattgcgttatttgcagagccgaaaaggtcggcacggactattattactgtgtcgagtgtgatatgaggtaccacaaagaatgtgtcgagtctccacttaggatcaattatccttcccacgccaatcattctttccaactttactcttccaagaaaagattcaagtattgcatcatgtgcagaaaaaaagtaaacggtctcgtatattattgtgctctttgtgacatgtatatgcatacgctttgtgcccaggcggtaataccctttttcatagaccaaccaaaaaggcatgcccatatcctcacccttttcccaaggcaagcttccttaacctgcaatatttgtggtgtacttgatgaacttcatttcacctacgtttgtcctatatgcgattttgtcacccatgctgattgtatatatatcccacaaaccataagaatatctcgccaccaccactgtatctctttcacttcttctcttctaaaaggaaaatggtcttgtggagtttgccgtcaagaagttgacaggaagtatggtgcatacacttgcaatgcgtgtaatggctacactgttcacacaagatgtgcattgcgtaatgatatatgggatggaaaagaacttgagggagtacaagaagatgaagaagttgagccgccgttcaaaaggatatcagatggaataatactccatttttctcatggctgtcaaatggaattggagaccagtggagttcacgtcggcggaaacaagttttgtcaggcatgtgctcttccaatcaacgaggaaaacttttatatatgtgtggaatgtgacttcattctacacgaaacatgtgcagaagctccgcaaaagaagtttcatccattacatccccatgcacttcaacaaaaggttgtccatgaaaatgatttattcttatgtgatgcatgtgatcgcttatgtaatggtttcggatatgagtgtacgttcgaggattgtgattacatactagatgtagtatgtgcatcggcttctgagccgttcaactatcaaggccatcaacacccattattcctagcgttacgcccaaacgtaaagccaatgtgccacatttgcaagtcaacgaaagaaaaccaggtactcaactgcattgagggtgactttattatatgttttgaatgcgctaccttaccatatgtgataagatataagcatgatgatcattacctcacattatgtcatggagaggaggcaagtgactcagattggtgtgagttatgcgagggaaaattgtcaactggaggagaaaaagggttctataagtgcgatgattgttgtactacgcttcatattaattgcttacttggccctaatccatttttgaagcccggtcaaactttcacgttgggtcgtaacgaatttctagttatacgcaacaattctcctcgtccaatttgcggcacctgcaatatgcgtcgtccgtatccagtaatgtttttctgggaatcggatcatcgatcgataaccaaaccaaaagaaaaatcaagtaaaacgttagtgtaa

SEQ ID NO: 1124 - protein, 649 aa, Arabidopsis thaliana
MDLFGEFRKVEIDGKPFLVYHKVMKPLPQIHTPNSSDEETTIEKPLSIQNEETSSDEETIDSGDNLPLPLLFACPIVRLTSTVIIDNITLQDDQGKSVEHFFNLKTSPFHGDNTSVDHDPVLPLFWCNNKEADPENDCVICRAEKVGTDYYYCVECDMRYHKECVESPLRINYPSHANHSFQLYSSKKRFKYCIMCRKKVNGLVYYCALCDMYMHTLCAQAVIPFFIDQPKRHAHILTLFPRQASLTCNICGVLDELHFTYVCPICDFVTHADCIYIPQTIRISRHHHCISFTSSLLKGKWSCGVCRQEVDRKYGAYTCNACNGYTVHTRCALRNDIWDGKELEGVQEDEEVEPPFKRISDGIILHFSHGCQMELETSGVHVGGNKFCQACALPINEENFYICVECDFILHETCAEAPQKKFHPLHPHALQQKVVHENDLFLCDACDRLCNGFGYECTFEDCDYILDVVCASASEPFNYQGHQHPLFLALRPNVKPMCHICKSTKENQVLNCIEGDFIICFECATLPYVIRYKHDDHYLTLCHGEEASDSDWCELCEGKLSTGGEKGFYKCDDCCTTLHINCLLGPNPFLKPGQTFTLGRNEFLVIRNNSPRPICGTCNMRRPYPVMFFWESDHRSITKPKEKSSKTLV

SEQ ID NO: 1125 - DNA, 1872 bp, Arabidopsis thaliana
  CDS (1)..(1872)
atggacttgttcggagaatttcataagggagaaatcgatgggaaaccatatcttctgtaccacaacgtaatgaaaccatcaacacaaacacacacctcaaactcctccgctgaaaaaaccaccatccaaaaaccattatcactccaaaacaaaacaaactcctccgatgaagtaaccatcggtgacggagacaacctccctatttcacctattttcatctgccttaatttacgattgcaaaaatcagcgaggattcagaatattgcattaggggatgaagacgggaaagccttacgtgataaatttttcaagctcgagacttcccctctccaaggccatggtgacaatatatcggatgatcatgtcgtactccctcttttttggtgcaacaacaaagaagctgatccaaagatggattgcaatatttgcagagtgcaaaaggcaggcacaaactattattactgtgtcgagtgtgatgtaacgtaccataaagaatgtatcgagtctccacttgagatcagttatcctacccacgccaaacatactctccaactttgcttttcatctctgcgaggagttcatcagtgcatcatctgcaaaaacagagcagatcttatcatttattattgtgctctgtgtgacatttatatgcatgcggtttgtgctcaggcggcaatacccttttttatagaccaaccaaaaaggcatgatcataccctctctcttttccctagacaagcttccttaacctgcaatgtttgtgctttggtcaataaactccatctcacctacgtttgtcgttctatatgcgatttcgtagcccatagtgattgcatccatgtcccacaaaccataagaatatctcgtcaccaccatcgtgtctcttttacttcttctcttccattagaaaaatggtcttgtggagtttgtcgtcgtgaggttgaccatgattatggtgcatacacttgttgtgtgtgtagtggctacgctgttcacacaagatgtgcattgcgcacagatatatgggatggcattgaactcgagggagtgcaagaagatgaagatgttgagcctccgttcaaagggatagctggtggaacaatacttcacttttctcatggttgtcaactggaatttaagacaagtgaagtttacgaccaagaaaagttttgtcaagcatgtgcccttccaatctacgagaagaatttttatgaatgtgtagaatgtgacttcatcctacatgaaagatgtgtagaggctccccgtaagaaggtccatccattacatccccatccacttatacaaaagtttactcacgtagaaggcggcttctcatgtcaggcgtgtaatcgcatgagtaatagttttggatatgagtgtctcatggaagattgtggctacaatctagatgtagtgtgtgcctctatttctgagccgtttgattatcaaggccatcaccaccccttatttctgtctttagaccccaaagaagagccaatctgccacatttgcaggtataagcatgatgaacattacctcacattttgtcgtggagatgaggcaagtggcgcagactggtgtgagttatgcgaaggcaaattagcaattggaggaaaggaaggcttctataaatgcaacgagtgttgtaccacacttcatattaattgcttacttggcccggaaccatatatgaagtctggtgaaactcccccaaaggagggaggtcaggttcgagttttcttgcaacgcaacaagtctccttctcggccaatgtgcgctaaatgcaaaatccgttgtccgtatccaacatatgtggaaatgagaaagaaaatgtattatccctattttctatgtaccctttttcatccataa

SEQ ID NO: 1126 - protein, 623 aa, Arabidopsis thaliana
MDLFGEFHKGEIDGKPYLLYHNVMKPSTQTHTSNSSAEKTTIQKPLSLQNKTNSSDEVTIGDGDNLPISPIFICLNLRLQKSARIQNIALGDEDGKALRDKFFKLETSPLQGHGDNISDDHVVLPLFWCNNKEADPKMDCNICRVQKAGTNYYYCVECDVTYHKECIESPLEISYPTHAKHTLQLCFSSLRGVHQCIICKNRADLIIYYCALCDIYMHAVCAQAAIPFFIDQPKRHDHTLSLFPRQASLTCNVCALVNKLHLTYVCRSICDFVAHSDCIHVPQTIRISRHHHRVSFTSSLPLEKWSCGVCRREVDHDYGAYTCCVCSGYAVHTRCALRTDIWDGIELEGVQEDEDVEPPFKGIAGGTILHFSHGCQLEFKTSEVYDQEKFCQACALPIYEKNFYECVECDFILHERCVEAPRKKVHPLHPHPLIQKFTHVEGGFSCQACNRMSNSFGYECLMEDCGYNLDVVCASISEPFDYQGHHHPLFLSLDPKEEPICHICRYKHDEHYLTFCRGDEASGADWCELCEGKLAIGGKEGFYKCNECCTTLHINCLLGPEPYMKSGETPPKEGGQVRVFLQRNKSPSRPMCAKCKIRCPYPTYVEMRKKMYYPYFLCTLFHP

SEQ ID NO: 1127 - DNA, 1500 bp, Arabidopsis thaliana
  CDS (1)..(1500)
atggacgtggtcggagaatttcaaaaaggagaaatcgatgggaaaccatgtctcatataccaaaacgttataaagccacaaatacacagcccaaattcctccgatgaaaaacacctcattcaaaacccattaccaatccaaaacatgactaaagttgccattgattccggcgacaacctccctcctccacctctatttatatgcccttcattacgattcaaactaacaataacgatcgaagctaaactattagatgatgggggcccaacgcctgatgttgatggcaagctaaggatttcccatctccttggtgacaatatgatgtatggtcatgacatactccctctcttttggtgtaacaataaagaagctgatccaaaaaacgattgcagtatttgcaatacccgaaaggtcggcacatgctattatttctgtgtcgagtgtgatcaaaggtaccacaaagaatgtgttgagtctccactagagatcaattatccttcccacgtcaaacattctctccaactttataatgtaaaaacatttgagcattgcatcttgagcacaaagaaagcagaagttttgctttattattgtgctctttgcgacatttatatgcatgtcctttgtgctcaggcaaaaatcccttttctcatagaccaaccaaaaaagcatgaccataccctcaccctttttcctagacaagcttccttaacatgcaatgtttgcggtttggtagataaacttcatctcacttacgtctgtcgttctatatgcgattttgtagcccatatagactgtatccataacccacaaactataagaatctctcgtcatttccacggtgtgtctttcacttcttctcttccatcaggaaaatggtgttgtggaatttgtcgccgagagattgacagtgattatggggcatacagttgcaatgtgtgtaaggactacgctgttcacacaagatgtgcattgcgtaaggatatatgggatggcattgaactcgaaggagtaccagaagacaaagatgttgagcttccgttctacaggatagctgatggaatcatacttcacttttctcatggttgtcatatgaaatttgaaaccaatggagtttacaaagaaaacgagttttgtcaagcttgtgtccttccaatcaacgaggaaaacttttatgtctgtgtgaaatgtgactttattctacatgaaaaatgtgcggatgccccccggaagaaggttcatccattacatccacatccaattgaacaaaaggttgtccatgaaaaccatgaattcgaatgtgctgcttgtatgcgtaagagtagtggttttggatatgtgtgtaccatcaatggttgtgactacgagctagatgcagtgtgtgcttcggcttctgagccatttaattatcaagtccatccacaccctttatttctggctttagacccaaagaaacgacagtatgccacatttgcaagtcaacaggagttcaaaaggtag

SEQ ID NO: 1128 - protein, 499 aa, Arabidopsis thaliana
MDVVGEFQKGEIDGKPCLIYQNVIKPQIHSPNSSDEKHLIQNPLPIQNMTKVAIDSGDNLPPPPLFICPSLRFKLTITIEAKLLDDGGPTPDVDGKLRISHLLGDNMMYGHDILPLFWCNNKEADPKNDCSICNTRKVGTCYYFCVECDQRYHKECVESPLEINYPSHVKHSLQLYNVKTFEHCILSTKKAEVLLYYCALCDIYMHVLCAQAKIPFLIDQPKKHDHTLTLFPRQASLTCNVCGLVDKLHLTYVCRSICDFVAHIDCIHNPQTIRISRHFHGVSFTSSLPSGKWCCGICRREIDSDYGAYSCNVCKDYAVHTRCALRKDIWDGIELEGVPEDKDVELPFYRIADGIILHFSHGCHMKFETNGVYKENEFCQACVLPINEENFYVCVKCDFILHEKCADAPRKKVHPLHPHPIEQKVVHENHEFECAACMRKSSGFGYVCTINGCDYELDAVCASASEPFNYQVHPHPLFLALDPKKRQYATFASQQEFKR

SEQ ID NO: 1129 - DNA, 1488 bp, Arabidopsis thaliana
  CDS (1)..(1488)
atgcgtagagatcttcgagctcttccgtgcagtcactttcccaagatcttcatcaatggaaatcacgattgtcatttttgtaaaattgatctttcgacgacgtctttgtatgctcgttgcacgatatgcaatgtaaacatggatctagactgtatggtgaatctaccaccactcactattttcgagccaaagcaccataagcatagcttcaacctcttgttacgagtagtcacctttacttgtaatgcatgtggattggaaggtgaccgtaatccttatgtatgttatgaatgccatctcatggtacacaaagattgtattgaaggtctaccgggagtcatatacatcaatcggcatgatcatcgtgtctctcacacttttcatcttggtcaagaagagagagattgggagtgtggagtttgtcgtaggacgattgattgggtctacggagcatatacatgttctctttgtcctagttatgctgttcattcaaaatgtgcaacgaggaaagaagtgtgggatggtagagaactcgaagatgtgtccgaagaagatgaagaaattgaagatccattcaaagtaattaatgaaacggatatcatacattttagtcatgaagaacatgtacttagattggatgagaattgtcatatggaaaatgacgctacgcgttgccgggggtgcattcttgctattaatggcaatctatcctacaaatgtctggaatgcgatttcatcattcacaaagtatgtgcaagtcttccgcggaagagacgacattttttgcacaaccataaactcactctacgagttgacaaggcttctatatttttatgttctacttgtgataccactcctaatggtttcagatacgagtgtgacgaagaccatggcgatgaagaatttgtctttgatcttcagtgtagttccatatcagaaccctttctacacgatttgcatccacacccgttatactggaccttggaacattccaaaaagtgtaaggcttgtggcaccaaagcaggttatgatctcaactgtatagtgtgtgatgattactcattatgcatgacgtgcgctactttaccaagtaaagtaaaacataggtgtgacgatcatcttctgtcactacgtcaaggtgcttctgacttcgatactggtcacttgtggtgtgatatttgtgagaccaagacagatccgagtgtattttactatacttgtgatgattgtggggtcagccttcatttaaagtgtgtacttggagatttatataatgcgaagctaggactaatagatcccagagatcccgctcatgaagtacttcccaataatggtgttactcgacctttctgcttccattgtgaacttcgttgtaagttccccttccttataaggagagctacagaagaatttactctttactattgttcgctaaattgttgtttagaagcagccttctatattccacctgtaacagatgaagggtag

SEQ ID NO: 1130 - protein, 495 aa, Arabidopsis thaliana
MRRDLRALPCSHFPKIFINGNHDCHFCKIDLSTTSLYARCTICNVNMDLDCMVNLPPLTIFEPKHHKHSFNLLLRVVTFTCNACGLEGDRNPYVCYECHLMVHKDCIEGLPGVIYINRHDHRVSHTFHLGQEERDWECGVCRRTIDWVYGAYTCSLCPSYAVHSKCATRKEVWDGRELEDVSEEDEEIEDPFKVINETDIIHFSHEEHVLRLDENCHMENDATRCRGCILAINGNLSYKCLECDFIIHKVCASLPRKRRHFLHNHKLTLRVDKASIFLCSTCDTTPNGFRYECDEDHGDEEFVFDLQCSSISEPFLHDLHPHPLYWTLEHSKKCKACGTKAGYDLNCIVCDDYSLCMTCATLPSKVKHRCDDHLLSLRQGASDFDTGHLWCDICETKTDPSVFYYTCDDCGVSLHLKCVLGDLYNAKLGLIDPRDPAHEVLPNNGVTRPFCFHCELRCKFPFLIRRATEEFTLYYCSLNCCLEAAFYIPPVTDEG

SEQ ID NO: 1131 - DNA, 1974 bp, Arabidopsis thaliana
  CDS (1)..(1974)
atggaaatagtggaggtatcaccaattcacaaacatcctttgttacctattactcgtttttctcgtgaacattgtaaatgtaatgtgtgtgggtctgttggttacatttacggaggctactgttgcaatgaggtgggatgtgaatccatgtttcataaagagtgtgttgagtctttgtcagaaatcaagcacacttctcatcctgatcatcctctcaagctgctcataagtgacaaagcatcattctgtagtcggtgtgaaggtcggtttgaaaacggttatatatgttctatttgcgacttcaagttggattttcgttgtgctaaaggacctgccccactccttattcttgaaaaatccaatctgcacgagcatctacttgaattcttcgtgggatggcactcttggaagggacatagagagtgcaaagcgtgcggcggtgcgggtttccgcggttatcgatggtatggatgttatcaatgtgatacactcttccatggagaatgtgctgagttttttccagaagcaaaacacacttctcacccgcaacacacactcaaacacatcacatctgaagaagcacccgattacgccgacaacaagtgtcttctttgcgaggaggagtttgatcaacaacatcccaaaattcaccattgtgatgtttgtaatttcaccatatgtagagcatgtatgaaaaacgcaccaccggttcgtattgaaagccttacaacccatgaacatcaactacatctcgttccaagacgcattgatttcacttgcaatgcttgcgggacgctaggtgaccgaagtccttacttttgtcttcaatgcaatttcatgattcatcgccagtgtatcgatttaccacgggtcataaacatcaaccgccacgatcaccgcatctcttacacccgtcgccttggacatggagagtggaaatgcaaagtctgccgcaaaaaagtggatgggttctacggggcttatacttgcctcaaatgtcctagttttgttgttcattcactatgtgcaacaagaaacgatgtgtgggacatgatagagctagaagggatgcaagaagaagaggaaattgcgccatacgagatgattgatgctaacacgataaaacatttcagccatgatcataacctacaaatcaacaatgatggccatggcaggattcaacctgaaaatatagtttgtgaagcgtgtgtgttccagatcttgtcagaaccgttctacagttgcaaccaatgtagttttatactccacgaaaaatgtgcaaatcatccacggaagaaacgccacgtgtgcaacaacacgtcattcatactattcacagattcttgcaacaaagctaacgcttcgtgtggtctttgtaaacaacatttcactggtttcagatacgaatcaggcccttatgttactatagatgtacgatgcgctgcaattttggatacaattgagcacggaagccatcaacatcctttatattactacactacatttgactggaagccttgtagccgatgcagagaggagggcgccgttttatttcgttgtgatgagtgtgactacattttggatggaaactgtgctctttttccaaaaaaggtaatgagaaatagatacgatgatcatcttctcttcttgtctttcggtgacaagaatgtgagtggtgactattggtgtgaagcatgtgaaacgaaagtgaacccaaaggaatggttctatacatgcaacgattgtggaaccatattacatatatcttgtgttgtgggagatttctcatatatcatgccaggttctcatataacaacatggagagctaacgtggtatccaacacctctatttgtagaccagtttgctatatgtgtaactctcgatgcaaacttccttctgttcttaagctttctgacaccaaagttgatgtatacctttgttctttcaaatgtgcctattttattaggaaataa

SEQ ID NO: 1132 - protein, 657 aa, Arabidopsis thaliana
MEIVEVSPIHKHPLLPITRFSREHCKCNVCGSVGYIYGGYCCNEVGCESMFHKECVESLSEIKHTSHPDHPLKLLISDKASFCSRCEGRFENGYICSICDFKLDFRCAKGPAPLLILEKSNLHEHLLEFFVGWHSWKGHRECKACGGAGFRGYRWYGCYQCDTLFHGECAEFFPEAKHTSHPQHTLKHITSEEAPDYADNKCLLCEEEFDQQHPKIHHCDVCNFTICRACMKNAPPVRIESLTTHEHQLHLVPRRIDFTCNACGTLGDRSPYFCLQCNFMIHRQCIDLPRVININRHDHRISYTRRLGHGEWKCKVCRKKVDGFYGAYTCLKCPSFVVHSLCATRNDVWDMIELEGMQEEEEIAPYEMIDANTIKHFSHDHNLQINNDGHGRIQPENIVCEACVFQILSEPFYSCNQCSFILHEKCANHPRKKRHVCNNTSFILFTDSCNKANASCGLCKQHFTGFRYESGPYVTIDVRCAAILDTIEHGSHQHPLYYYTTFDWKPCSRCREEGAVLFRCDECDYILDGNCALFPKKVMRNRYDDHLLFLSFGDKNVSGDYWCEACETKVNPKEWFYTCNDCGTILHISCVVGDFSYIMPGSHITTWRANVVSNTSICRPVCYMCNSRCKLPSVLKLSDTKVDVYLCSFKCAYFIRK

SEQ ID NO: 1133 - DNA, 1986 bp, Arabidopsis thaliana
  CDS (1)..(1986)
atgaattccaatccagtgggtgtatttcgtgagagggaaatcgatggaaaaccatttcacatatacactttatcatctcaaacagacaccacaatcccttcttcttccggtgaaacagccattgatggcgacgaccacctctctcttcaacaacctcttttcctctgtccttctttacgtcttagggttcacgaggaaaacaattcctatactgaatttctcccgtacaagacttcccctcacttccccagcataggaagcgttgatcaacaagtccagcatttgcttgattccgacagccaacaagtccatgatttgcttcattccgacagcagccatgatgatgatgatgatgatgatgtaatctgtaagctcccagttgtccctatctattggtgcaatagtaaagaacttgattatgatcaatttaattgtggtgcatgtgaacgatcaaagattggcacaaactattatgtctgtctcacgtgtgatctaatgttccacaaagaatgcgtagagtctccccttgagataaaacacccttcctatccctttctttcactcaaactttacaatcgtcccggccaccgcgtgagttgcatgtgctgtgatttagctctctgtagcatgctttatcattgtcccacctacaaacttagtatgcatcccgtttgtgcgatgaagccaatacccattttcatagaccactcaaaaaggcatccccaccttctcaccttttttcccaaacaagcttccttactttgcgatgtttgtggcctcgttaaagaatcttttcccacatatgtttgcgttcggtgtatctttgtagtccaccgagattgtatctatttcccgtttgtcattaaaatatgtcgtcaccaccatcgtatctcttttacctcttctcttccatccggaaaatggtcttgcggagtctgtcgtcaaaaagttgacaacaattgtggtgcgtacacctgcaacaagtgtaaccactattttgttcatacaagatgtgcgttacgggaagacgtgtgggatggaaaggatctcgagggagtacctgaagagcctgaaataattctcgagccatttgagacgatagctgatggaataatactccatttttctcatggccatcatctaacactcgagatcagtagagtttacgacgaaaacaagttttgtcaagcgtgcatccttcccatctatgagggtaactattattcatgtatggatgactgtgacttcatcctccacgaagcatgtgcaaatgcttctcgcaagaaacatcatgccttgcacggtcacccacttacgctaaaaattgtccctggcgaacaagaatactataaagattacttccagtgttctgcttgttatcgtcaaagttgtggctacgtctatgaagctggatattacagaatagacttacggtgtgcctcagtttctgaaccctttcaatatcaaggtcatgagcatcctttatttctagctttagatcgacaacaagaacttgaggcaacttgtcaaatctgccaacagaaagctacttttcttcgaaaactaaattgcatcgaatgtgattatgttatatgttttaagtgtgctactttaccatacgaggcaaagtataagcatgacaaacatttcctcacatttcgggaagggaaagaggaaagtgatcaattagactggtgtgaagtatgcgaaaaaagaatagtatactcaagaaaagatggcttctatgcttgtgatcactgttgcaccactcttcatgttcattgtttgcttggagaagacatgtatatgttgaaacctagtcaaaccataacgtatattaagagggaggttcatatccttcccaacaatacccggtctcgaccattctgccatcatcatgatgaagaccgttgtccacacaaagtagttttcaaatggcaggaccagtacacgatattttgttcttaccgttgtttgacaaagtaa

SEQ ID NO: 1134 - protein, 661 aa, Arabidopsis thaliana
MNSNPVGVFREREIDGKPFHIYTLSSQTDTTIPSSSGETAIDGDDHLSLQQPLFLCPSLRLRVHEENNSYTEFLPYKTSPHFPSIGSVDQQVQHLLDSDSQQVHDLLHSDSSHDDDDDDDVICKLPVVPIYWCNSKELDYDQFNCGACERSKIGTNYYVCLTCDLMFHKECVESPLEIKHPSYPFLSLKLYNRPGHRVSCMCCDLALCSMLYHCPTYKLSMHPVCAMKPIPIFIDHSKRHPHLLTFFPKQASLLCDVCGLVKESFPTYVCVRCIFVVHRDCIYFPFVIKICRHHHRISFTSSLPSGKWSCGVCRQKVDNNCGAYTCNKCNHYFVHTRCALREDVWDGKDLEGVPEEPEIILEPFETIADGIILHFSHGHHLTLEISRVYDENKFCQACILPIYEGNYYSCMDDCDFILHEACANASRKKHHALHGHPLTLKIVPGEQEYYKDYFQCSACYRQSCGYVYEAGYYRIDLRCASVSEPFQYQGHEHPLFLALDRQQELEATCQICQQKATFLRKLNCIECDYVICFKCATLPYEAKYKHDKHFLTFREGKEESDQLDWCEVCEKRIVYSRKDGFYACDHCCTTLHVHCLLGEDMYMLKPSQTITYIKREVHILPNNTRSRPFCHHHDEDRCPHKVVFKWQDQYTIFCSYRCLTK

SEQ ID NO: 1135 - DNA, 1554 bp, Arabidopsis thaliana
  CDS (1)..(1554)
atgcttgattctcacaaccgcggtcttatctgtaagctccctgttgtccctctcttttggtgcaacaataaagaacctaatggtgccgacttctgttgtagtgcatgcaaactcacaaatcttggcacagcctactatttttgtgccacatgtcgtaagaagttccacaaagaatgtgtggagtctccacttgaaatcaaacacccttcctatccctttcaatctctccaactttatagttctccctttgctcttgtgaattgcatatgttgtgatataagtttccaagacattatttatcattcttctaatcacaaactgagtatgcatcctgtttgtgcgatgaaaccagtacccatttttatagaccacacaaaaagacatccccaccctctcactttttcccctagggaagctttcttaccttgcaatgtttgcggcctgattaaagaatctattctcacctatgtttgtgttccatgtgactttgtagtccatcaagattgtctatatttcacgcatgtcataaaaatatctcgtcaccaccaccgtatcatttttacctcttctcttccatatggaaaatggtcttgcggagtctgtcgtagggaggttgacaatcattatggtgcttactcttgcatcaagtgtggtgattattttgttcatacaagatgtgcattgcgaaaagatgtgtggaatggagaagatctcgagggagtacctgaagaacctgagatagatgttgagccatacgagacgatagctgatggaattatactccatttttctcatgaccatcatctaaaactcgagatcaatagagtttacgatgaaaacaagttttgtcaagcgtgcatccttccaatctatgagggtacgtactattcatgtttggataaatgtgaattcatcctacatgaagcatgcgttaatgcccctagaaagaaacaccatccgttgcatactcacccgcttacgcttaaggtcgtcagtattggatacgatcattacagaagaagaggaaattacttcgactgtggtgcttgtaagcgtgcaagttgtggttttgtctatgatagtcaggatttctcacttgatttgcggtgtgcctctatttccgaaccatttcaatatcaaggccacaagcatcccttatttctagccttagagccagatgaagaaaaagcggcgatatgtcaaatttgccaagaagatggtgatggaaataactatattagaaaactaaattgcatggaatgcaagtatattatttgtttcaggtgtgctacattgccatacaaggcaaagtacaagcatgacaaacatttcctcacatttcgggaaggggaagagggaagtgatcaattagactggtgtgaggtatgcgaaaagaaattaatatactcaagaaaaggtgggttctatgcgtgtgatgactgttgcaccactctccatgttgattgtttgcttggggagatgagtttgttcgatggattaaatgtcatcatcgccggtgcttcgtcgtttacttctagatctctacttttctag

SEQ ID NO: 1136 - protein, 517 aa, Arabidopsis thaliana
MLDSHNRGLICKLPVVPLFWCNNKEPNGADFCCSACKLTNLGTAYYFCATCRKKFHKECVESPLEIKHPSYPFQSLQLYSSPFALVNCICCDISFQDIIYHSSNHKLSMHPVCAMKPVPIFIDHTKRHPHPLTFSPREAFLPCNVCGLIKESILTYVCVPCDFVVHQDCLYFTHVIKISRHHHRIIFTSSLPYGKWSCGVCRREVDNHYGAYSCIKCGDYFVHTRCALRKDVWNGEDLEGVPEEPEIDVEPYETIADGIILHFSHDHHLKLEINRVYDENKFCQACILPIYEGTYYSCLDKCEFILHEACVNAPRKKHHPLHTHPLTLKVVSIGYDHYRRRGNYFDCGACKRASCGFVYDSQDFSLDLRCASISEPFQYQGHKHPLFLALEPDEEKAAICQICQEDGDGNNYIRKLNCMECKYIICFRCATLPYKAKYKHDKHFLTFREGEEGSDQLDWCEVCEKKLIYSRKGGFYACDDCCTTLHVDCLLGEMSLFDGLNVIIAGASSFTSRSLLF

SEQ ID NO: 1137 - DNA, 1899 bp, Arabidopsis thaliana
  CDS (1)..(1899)
atgtcttatggccaagaagagacgatatcttatggcggagaggaagagctattaatatctagcaaagtatctggtcaagaagaagaaatatgtcgtttgtctcatccatctcatcctcacaccctctcccgtcgatatggtgaacaccctccgtctggttgttttgcaagctcagactccacattcataaggcattctctttatttctattttttctgtaccacatgtgatctagagttcgatcagtattgctacttgcggccaaggaagatgacacacccttatcacccacaacatcctctcattttcagtgttcaagaccgtcaaaccggcatcatacatgattccgatatacattcctacgacgtatcatcaataatacctgaggatagttctattcttggtaactgcaattggtgtggaaatgatttaagaagttttgactttttctatcgatgttctatctgtaacttttctttggattctagttgttcccaaagctttccacttcctaccatctcaaatccaaaaagccatcaccattcactaattttccttcctcgacctcttttgtttccatgtgatgcttgtgggttggtagagcaatggagaccaagttatgcttgttttcaatgtaattacgtggtccacaaggattgtatagacttaccacgcgtcataaaaatcacccgtcaccctcatcgtcttttttacactccttttctttcaccctcaacttcatcgttgtgtcgtctttgctacgagacagttgatatcaactatggccagtatacgtgcaatcatgatgattgctcttttgtagtccattccaagtgtgcaacacataaaaatgtatgggatgggagagaactcgaatgggaacctgaagagtttgacgaaaccgaagatgttgcaccattcaaaaaagttggtgatgatttgattaagtacttttgtcatgatcatcatctgaagcttgagaagtatgaccgtgttcgagacatggataagcaatgtcaagcgtgtgtccttcatgtcgactctcgccatttctacaactgctttcaatgtgattatgttctccatgaggtatgtgccaatcttcctcggaaactagatcatggattgcataatcaccctcttttcctagacccggttccactaaacgcatgggattcctcaaattgttcagtttgcgagcgagtgaccgttggttttgtgtacaagtgctccaaaaagagatgtacgcgtatttaccagcaaaaaaggttccaggtagatgttagatgcatcttagttcctgattgtttcacccacaaaagtcatgaacatcccttattcctccctatccataactatgatacgagactatgtaatggttgcaatcacacaggctcaacctcgtcatactatctacagtgtactctatgcaaagtttttctatgttatgagtgtgccaccattccagataagctacacaacaaatatgatgcagttcctttctccctttgttacggagaagtctcagatcaaacatactggtgtgaagtctgcgaggggatactagatccaagggaatggttctacacatgcagcaaaccttacatcactatccaccgcagttgtgtatttgggtggtccgcttatatgatgccaggctacacgttgcttttcggaaacttgagtataaaagttatttgcaacagtagtaacactcgactgatgtgccacaactgtgacaaccgctgctcgagtactgtatatttaaagttgtctaatgggatagctatttgttcttatcagtgtcttcgagattttaattctaaactcgatcgtagccccagagcgcgatataatgttgaactagtaaactggtacttagctgcattagcagattga

SEQ ID NO: 1138 - protein, 632 aa, Arabidopsis thaliana
MSYGQEETISYGGEEELLISSKVSGQEEEICRLSHPSHPHTLSRRYGEHPPSGCFASSDSTFIRHSLYFYFFCTTCDLEFDQYCYLRPRKMTHPYHPQHPLIFSVQDRQTGIIHDSDIHSYDVSSIIPEDSSILGNCNWCGNDLRSFDFFYRCSICNFSLDSSCSQSFPLPTISNPKSHHHSLIFLPRPLLFPCDACGLVEQWRPSYACFQCNYVVHKDCIDLPRVIKITRHPHRLFYTPFLSPSTSSLCRLCYETVDINYGQYTCNHDDCSFVVHSKCATHKNVWDGRELEWEPEEFDETEDVAPFKKVGDDLIKYFCHDHHLKLEKYDRVRDMDKQCQACVLHVDSRHFYNCFQCDYVLHEVCANLPRKLDHGLHNHPLFLDPVPLNAWDSSNCSVCERVTVGFVYKCSKKRCTRIYQQKRFQVDVRCILVPDCFTHKSHEHPLFLPIHNYDTRLCNGCNHTGSTSSYYLQCTLCKVFLCYECATIPDKLHNKYDAVPFSLCYGEVSDQTYWCEVCEGILDPREWFYTCSKPYITIHRSCVFGWSAYMMPGYTLLFGNLSIKVICNSSNTRLMCHNCDNRCSSTVYLKLSNGIAICSYQCLRDFNSKLDRSPRARYNVELVNWYLAALAD

SEQ ID NO: 1139 - DNA, 1743 bp, Arabidopsis thaliana
  CDS (1)..(1743)
atggctgctaatgaagaagagccaatatgtcgtttgtctcatccaactcactctcacaccctctcccgtagagccggaagaatccctccatcgggttgcttcgcatgcgacaaagaagaaccctcaccatgttctaccttccattactcctgcaccacttgtgatgtggagttccacgatatttgtcacgtgtatccgaggaagctcacacacccttatcaccttcaacatcctctcaccctcaccactcaaaacactgaaatagagatcatatctaaaaaccccgaatatggttacatattcaaaaattgtaattggtgtggagatgatttgagagatggatctcaattctatcattgttctatttgtaacttttgtttagatctctcttgctcccaaaactttccaactcttacaattacaaatccaaaaagccaccatcattccctctttttatttccttggcccctcttaattccatgtgaagcttgtgagctggttagtttgttggaaccaagttatacttgtttccaatgcaactatttggttcatgagagttgtatcaacttaccgcgtgtcataaaaataacgcgtcacccacatcgtctctctcacactcctttccttccacctacaactccatcttgtcgagtttgctacaagacagtcgacatcaaatatggccagtattcttgcgatcatgaaggttgctcttatgttgcccattccaaatgtgcaacacatatgcacgtttgggacggaagagaactcgaatgggaaccagaagaactcgatgaaactgaagatattgtgccatttaagaaagtgggtgataatatgatcaagtatttttgtcatgaacatcaccttaagcttgagaagtatgatagtgtccgagacgcaaagaaacaatgtcaagcgtgcatccttcgtatcgactcttatgatttctacaactgtgtgcaatgtgacttctttcttcacgaggtatgtgctggtcttcctcgaaaattggctcatgcattgcataagcatcctcttgttctagacccttctcctatactcgattacagttccacaagttgttcaacttgcgcccgtgagtccactggtttcaggtacaaatgttcaaaaactgattgcgatgatgagataacaattcagatagattttcgatgcattttagttcctgattgtttcacccacaaaagtcatgaacatcctttattcatctccacatcatattctagaaaaggaaacatttcttgtgatggttgcaaagatagtgttcgtgatgagtattatctgcaatgtactatttgctcatttgctatgtgttatcgatgtgcgaccattccatatgagttatactacaaatatgatgcacatcttctgtcgctttgctatggagaagatgcagagaaagcatattggtgtgaagtatgcgagaaagaattgaatccaagagaatggttctactcatgcaacaaatgttgtatcactatccaccttgagtgtatattcggatcttccgtttatattaagtcaggttacacattctatttcggctctgcatcgatgaaaattcttgggaacaatagtcatactcgaccgatttgttataagtgtgatcatcgttgcccggattcggtgtactacaagttgtttgagaaggttttttgttcctggctttgtgtttggacatctgacattgaaagttttgacaatgtcgaaaaggaataa

SEQ ID NO: 1140 - protein, 580 aa, Arabidopsis thaliana
MAANEEEPICRLSHPTHSHTLSRRAGRIPPSGCFACDKEEPSPCSTFHYSCTTCDVEFHDICHVYPRKLTHPYHLQHPLTLTTQNTEIEIISKNPEYGYIFKNCNWCGDDLRDGSQFYHCSICNFCLDLSCSQNFPTLTITNPKSHHHSLFLFPWPLLIPCEACELVSLLEPSYTCFQCNYLVHESCINLPRVIKITRHPHRLSHTPFLPPTTPSCRVCYKTVDIKYGQYSCDHEGCSYVAHSKCATHMHVWDGRELEWEPEELDETEDIVPFKKVGDNMIKYFCHEHHLKLEKYDSVRDAKKQCQACILRIDSYDFYNCVQCDFFLHEVCAGLPRKLAHALHKHPLVLDPSPILDYSSTSCSTCARESTGFRYKCSKTDCDDEITIQIDFRCILVPDCFTHKSHEHPLFISTSYSRKGNISCDGCKDSVRDEYYLQCTICSFAMCYRCATIPYELYYKYDAHLLSLCYGEDAEKAYWCEVCEKELNPREWFYSCNKCCITIHLECIFGSSVYIKSGYTFYFGSASMKILGNNSHTRPICYKCDHRCPDSVYYKLFEKVFCSWLCVWTSDIESFDNVEKE

SEQ ID NO: 1141 - DNA, 1989 bp, Arabidopsis thaliana
  CDS (1)..(1989)
atggaaaaagtagaggtaccaccaattcataaccatccgctgttaccttttactcgtttttcctacaaggcttgtaaagggtgtgggtatgttggttacatatatggaggctaccattgcaatgagttggggtgtgaatctgtgtttcataaagagtgtgccgacccgttaccagaaatcaaccactattctcatccagaccatcctctaaagctcctcataaatgtcgaaccacttgcttcttgtagccagtgtccatcttcgtttgaaaatggttatctttgttcgatttgtgacttcaagttggattttcgttgcgcgacgaggttgcctttggaatttattcttgaagaatccactgtccacgagcatccgattcagctctctgatggaacccgtgacggttttgtgcaactttgcaaaacatgcaaatggggagttttcgatgctgttcattacaaatgtaataaatgcgatttacgctttcatgtggagtgtaccaaactttttccacaagctagccacgttttacacccccaacacccactcaagctccttagatgtgaagaagcacccgattacgccgacaacaagtgtcttctttgcgggaataagtttgacggacgaattcaccactgtgatgtttgtaactttaccatatgtggcggctgtatggaaaacccaccgccgcttagtgttgtaagcccgaccacccatgagcatcaactttatcttctttcaaaacctctcggtttcacttgcaatgcttgcgggactcaagctgatcaaagcccttatttctgtcttcaatgcaacttcatgattcattgggagtgtatcgatttgccccgcgtcataaacatcaaccgccacgatcatcgcatctcctacactcgtcgtcttggacatgggcaaaatacatgcggggtttgtcgtaaaaaggttgatggcttctacgggggttattcttgctcaaaatgttctaactatgttgttcactcgagatgcgcaacggacgaggatgtatgggacatgatagagctagaagggacacccgaagagccagaggaagatgcgccattcgaggtgattgatgataacacgatcaaacattttagccatgatcataacttagtaatcaacaaggatgggaggattctccatgaaagcacactatgtaaagcatgtgtcttccagatctgttcagatgcgttctacagttgcgagaattgtgacttcattctccaccaaaaatgtgctaacctgcctcggaagaaacggcatgtttgcgacaacctaccatttaccctagtcacaaatgatacttcagacgaaacttcatgtgatctttgttggcaaagtttcaccggtttcaggtacgagtgtcttactcgtatggttactctagatgtacgatgtggttcaattcgagaaccattggtgcaccaaagccatcaacatcccttatacttttcgaaacgtagttctaagtcttgtacggaatgtggcaaaaacatggatctagatataggaagctttagctgtgatgagtgtgactatagtttggacttcaagtgtgctcttttaccgcagaaagtaaagtggcatagatacgacgatcatcctctttacttgtcgtgtggtgaaagtagtgtggatggagaatactggtgtgaagcatgtgaaacaaaagtgaattcgaagaaatggttctatacatgcaatgattgtggtgtcatattgcatatttcatgcgttgtgggagacttctcatattatatgccaggttccaaaataggatgggaggaagacttggtggtatccaacacctctatgtgtagaccattttgctatgtgtgtaactctcaatgcaagcttccttccattgttaaggtcgtttccaaagccgatgttgttttatacatttgttctttaaactgttattataatttcaaccgctctaataactactctagtagtgattggtaa

SEQ ID NO: 1142 - protein, 662 aa, Arabidopsis thaliana
MEKVEVPPIHNHPLLPFTRFSYKACKGCGYVGYIYGGYHCNELGCESVFHKECADPLPEINHYSHPDHPLKLLINVEPLASCSQCPSSFENGYLCSICDFKLDFRCATRLPLEFILEESTVHEHPIQLSDGTRDGFVQLCKTCKWGVFDAVHYKCNKCDLRFHVECTKLFPQASHVLHPQHPLKLLRCEEAPDYADNKCLLCGNKFDGRIHHCDVCNFTICGGCMENPPPLSVVSPTTHEHQLYLLSKPLGFTCNACGTQADQSPYFCLQCNFMIHWECIDLPRVININRHDHRISYTRRLGHGQNTCGVCRKKVDGFYGGYSCSKCSNYVVHSRCATDEDVWDMIELEGTPEEPEEDAPFEVIDDNTIKHFSHDHNLVINKDGRILHESTLCKACVFQICSDAFYSCENCDFILHQKCANLPRKKRHVCDNLPFTLVTNDTSDETSCDLCWQSFTGFRYECLTRMVTLDVRCGSIREPLVHQSHQHPLYFSKRSSKSCTECGKNMDLDIGSFSCDECDYSLDFKCALLPQKVKWHRYDDHPLYLSCGESSVDGEYWCEACETKVNSKKWFYTCNDCGVILHISCVVGDFSYYMPGSKIGWEEDLVVSNTSMCRPFCYVCNSQCKLPSIVKVVSKADVVLYICSLNCYYNFNRSNNYSSSDW

SEQ ID NO: 1143 - DNA, 2136 bp, Arabidopsis thaliana
  CDS (1)..(2136)
atgataaaattggctgcttctttatccaattgtaaacaaacacaaacccatatggcttcactgcggaagaagcttcccttaaacaggttccgccgccgcttggacaagctgcgatctagacataacattcgatctgtaaggcaaaggtttggcaatggcggcaacacgcagcagcaacggccaccaactaaacacctttgccctttctccgatccagttgaaccgcacaagctccaacgccgccgtttactaagtcagtctcaactctctgaatgcttcggatgcaaaggcaaacacttggagggaaaaaggtactattacttttgtcctctttgcaatttggaattccatagaggttgtcacgtcttaccacagcagatgaaacaccctcttcacctttctcacccactcaccctcatctccttagatcctaattttgacacctctaagatacctcaagaatggggagaatcgtcgtcctctgattcagaaggttcttttgacagtgatgatgagtttggtggtcgtcgtcgtcttcttcgtcgtcgtgctcgtttttttagtcctttttttgatgttgaagatgatgatgatgatgatgttgatcttgatgatgatgacgatgatgatgatgatgacgataacgatctatcagatatatattatggaaaatgcaaatgttgtcagaaacgttttgaagatatatactatcattgttctgtttgcaacttcagcctcaatttcacttgtacgataaagccaccacctctcactatcactcacctaaaaagccacagccacattctcactctttttcctagacgaatccctttaccttgtgatgtttgtgggttgtctctcaatgacgctcatgatccagtttacgcttgtcttccttgtaactacatggttcatagagcttgtattaatctacctcgtgtcattaagatcacccgccaccaacaccgcctgtctctcatttcctctcttatttccggtgatttttcttgtggagtttgtcgtaaaaccatcgacattagctacggacattattcttgcattaagggatgttgttatggtgcacattccaaatgtgcaacgaataaaaacgtgtgggacggcaaagatctcgaagatgtgcctgaagaaccagaagaagttatcgaaccattcgtaagaattgatgaggagacgatacatcatttcactcattcatgtcatctaaaactccaagggaagggtagccatcgcggtgaaaaaaagttttgtaaggcgtgctgctttccaatatcgatttatgatactttttacacttgtttggactgcgactttgttcttcacgaagcatgtgcatgtcttcctcgcatacaacatcatccgctacacaagcatccacttatccttaacaaaagtgacccctctcttcagctttacgttgatggttattctgttgaaggcatgtttgcttgcagtgcttgtcgccgacatagtacgggtttcgtgtacagttgcaacgtagaattttgtgactttcaggtagatgtcaagtgtgctttccttcctgatacatcagtccatgagagccatccaaatcaccccatctacatcaatttgaccaaaggagcatgcatgggttgtagtaatgcgtgttcaagaaagtacttagagtgtttgatctgcgactcctttctgggagttgaatgtgctactttgccaagtgtagcacactacaagcacgatagccatccactcacactttgctatggagaaaaaggaacaacaagtggtcaatactggtgtgagatttgtgaatcaaaactagatgcgagcgagtggttctatacatgtgactcttgtagagtcactctccatctgaaatgtttattgggaaatgacatgtacattaaaccccaacattttgtcggaaaagaaggagagattgaaattgctcttaacgatggtaacactcgaccgttttgctctgtatgtcatgtacgttgtacggacatttcggtattcaagtaccaagataatgtttactgtgatttgggttgtgttagaaaagttaagatctatgagagcagaggaagtgaactcttcagcagccaaacagcacagctcaagtccctcaagtga

SEQ ID NO: 1144 - protein, 711 aa, Arabidopsis thaliana
MIKLAASLSNCKQTQTHMASLRKKLPLNRFRRRLDKLRSRHNIRSVRQRFGNGGNTQQQRPPTKHLCPFSDPVEPHKLQRRRLLSQSQLSECFGCKGKHLEGKRYYYFCPLCNLEFHRGCHVLPQQMKHPLHLSHPLTLISLDPNFDTSKIPQEWGESSSSDSEGSFDSDDEFGGRRRLLRRRARFFSPFFDVEDDDDDDVDLDDDDDDDDDDDNDLSDIYYGKCKCCQKRFEDIYYHCSVCNFSLNFTCTIKPPPLTITHLKSHSHILTLFPRRIPLPCDVCGLSLNDAHDPVYACLPCNYMVHRACINLPRVIKITRHQHRLSLISSLISGDFSCGVCRKTIDISYGHYSCIKGCCYGAHSKCATNKNVWDGKDLEDVPEEPEEVIEPFVRIDEETIHHFTHSCHLKLQGKGSHRGEKKFCKACCFPISIYDTFYTCLDCDFVLHEACACLPRIQHHPLHKHPLILNKSDPSLQLYVDGYSVEGMFACSACRRHSTGFVYSCNVEFCDFQVDVKCAFLPDTSVHESHPNHPIYINLTKGACMGCSNACSRKYLECLICDSFLGVECATLPSVAHYKHDSHPLTLCYGEKGTTSGQYWCEICESKLDASEWFYTCDSCRVTLHLKCLLGNDMYIKPQHFVGKEGEIEIALNDGNTRPFCSVCHVRCTDISVFKYQDNVYCDLGCVRKVKIYESRGSELFSSQTAQLKSLK

SEQ ID NO: 1145 - DNA, 2115 bp, Arabidopsis thaliana
  CDS (1)..(2115)
atgtctcccgcaaaacaaataagatttgatcttgattgggttggtgaaaagaggatgaattctttcattactaaagtaatgtctctcgtcagctcaatggatttggatttgcagccgaagccggagtcggagttcatgtcactcactactcaaatattctctctactccactctatggattcggattccatgccgaagccgctctcaaatctcatctcactcctttctcaaggaaactttgaccataataccgacttcaggttattctttcgtcaaactatggcactcgagccagagccaatatttatgtcactcatctatcaaatattctccctagtaatatctatgaatactaagagggataagcttatttccttatgtcctcaagcatgcgtggttttgggtaataatgggaattttgaagtgatcgttaaaaaacaagaaggtcaagctcataagggcaaagcaatcccgtggagtagagatagcaagtgggaatgtcttccttttaactggaagacatattggtctagtggagatgatgttacacattttcgatgccgaaactgcgatggcgacaaccataaagaatatgaaaaggctccggttgagatcaaacactctcttcatcggaaacattctcttcagcttgtcttgttggatgagagtagttatacgagggtatgctattgttgcgatgaagatctcaaaaggatgttttattattgtcggacttgcgattttggtcttaatttcgtttgtgcgaagaaagaagcaatcttatatatagaccaaccgaagtggcatgagcatacacttgcgttgtttctaagaaagacttcgttaacttgcaacgcatgtggcttatcacattcaagttgtcctctctatatgtgtcccccttgtgactttgtgatccataagagttgtatcagcttaccacgtctcataaggatatcacgacatttccatcgtatagcttataccccttcttttgatgaaggagattggtcttgtagtgtttgtcgcaagaagatcgacaatgattacggaggctatgtttgtaccaaaggttgttcgtatgcggctcattcaaaatgtgccactcagagcaatgtgtgggatggtatagaacttgagggagagccagaagatattgaagaagaagtgcttcctccgtttttggagataagtgatggaatcatacaacattttagtcatcagcaacatcatatgaaacttgacgagaacacgggcagagattacgacgagaataaggagtgtgaagcatgcatcaggccaatctatttcggtaatttctactcttgtttggaatgtgattttattcttcacgaagagtgtgcaaacctttctcgcaagatacatcacccgatacatccacatcttctcaatctaattggaggatttgatggtgttataaactattataacgataaatgctcagcttgtattggactgtgcaaaggtggtttcttctatgagtgtggtaaacaaggatgtaagtttatgctacatgtgcagtgcgccacaacttctgagccattagttcatgaaagtcataggcatccactatttctaacatccaaaccaggagagaaaatacgttgttcagtttgcaaggattcagaagagacattcaattgcattgagtgcgactttgctttgtgtttctattgtgctattttacctcaaaaggtgaggtataagcatgataagcacacactcactctttcttacgggaaggagacaggtacgtcttggtgtgaagtttgtgaggctaaaataaatctgaaaggacggttttatatgtgtaatgagtattgttgtgtcaccctacacattaaatgtacgctaggggacttacacatgaggcccggttcaacgtggatcacctttggtaacaaggtagatgttctacacaacagtaaccgtatgtctcgatctatttgctcctattgtgtgaaacactgtccatataagatagtttacatgtgttctggattgatattatgttcccaaggttgtgtagtgcgtagcatattgcagaaacgtggacgttacagagagttagaatttttgagtagatatgcttaa

SEQ ID NO: 1146 - protein, 704 aa, Arabidopsis thaliana
MSPAKQIRFDLDWVGEKRMNSFITKVMSLVSSMDLDLQPKPESEFMSLTTQIFSLLHSMDSDSMPKPLSNLISLLSQGNFDHNTDFRLFFRQTMALEPEPIFMSLIYQIFSLVISMNTKRDKLISLCPQACVVLGNNGNFEVIVKKQEGQAHKGKAIPWSRDSKWECLPFNWKTYWSSGDDVTHFRCRNCDGDNHKEYEKAPVEIKHSLHRKHSLQLVLLDESSYTRVCYCCDEDLKRMFYYCRTCDFGLNFVCAKKEAILYIDQPKWHEHTLALFLRKTSLTCNACGLSHSSCPLYMCPPCDFVIHKSCISLPRLIRISRHFHRIAYTPSFDEGDWSCSVCRKKIDNDYGGYVCTKGCSYAAHSKCATQSNVWDGIELEGEPEDIEEEVLPPFLEISDGIIQHFSHQQHHMKLDENTGRDYDENKECEACIRPIYFGNFYSCLECDFILHEECANLSRKIHHPIHPHLLNLIGGFDGVINYYNDKCSACIGLCKGGFFYECGKQGCKFMLHVQCATTSEPLVHESHRHPLFLTSKPGEKIRCSVCKDSEETFNCIECDFALCFYCAILPQKVRYKHDKHTLTLSYGKETGTSWCEVCEAKINLKGRFYMCNEYCCVTLHIKCTLGDLHMRPGSTWITFGNKVDVLHNSNRMSRSICSYCVKHCPYKIVYMCSGLILCSQGCVVRSILQKRGRYRELEFLSRYA

SEQ ID NO: 1147 - DNA, 1830 bp, Arabidopsis thaliana
  CDS (1)..(1830)
atggattctagcgtcggaggattttatgaggtggaaaaggatggtaaccttgttttggtataccatcatccgaaatattgccccataccccaaacacagaccgtaacctcctccagtgaccttcaacctcttttcttatgccctcgatcacgacgtcgaaaaatcaagtcgtattcagacacttatccgcttaattcttcccccgagtacgtcctttctacaacgacgacctctcatgatcatcatgtactccctttgttttggtgcaacaataaagaatttgatgctgatggtggatgctacatatgcgaaggctcaaattccggcaccgactattatttctgcaactattgtagcataaaattacacaaagaatgcattcaatctccacttataatcaaacatccttaccaccctgagcactatctccaacttttctttcatgatgataactttcgtaagattgagtgtttatgttgtggaagaaaagcacattggttgatttatcattgcaccacatgccaggcttttatgcatcccatatgtgcgatgaagccaataccttttcttatagacccaccaaaaaagcatatccatcctctcacttttttccccagacaaacttccttgacttgtaatgtttgtggtttgttgagaaaaatttatcccacctacgtttgtttcagatgtaactttgtaactcataatgactgtatgaattccccacacatcatcaagatatcacgtcaccgtcatcgtatctcgttcactttttctcttacatctagagaatggttttgtggagtttgccgtttaagtattaacgttgattatggtgcatatacttgtgacacgtgtagcgattatgttgttcattcaatatgcgctcttgggaaagatgtgtgggatggaaaagaactcgaaggtataccagagataatcgatataacagaaaatgatggaccgttcgaggtgatatctgaaggagtgatactttattttcatcataatcatcatctccgactcgaggtcagcaacgtttatgatgaaaacatgctttgtcaagcgtgtgccattcctatctatgaaggtaacttatatgtttgtatggagtgtgatttcatcctccatgaaacatgtgctaaggctccccgtagaatccaacatgccttacatcctcacccacttgtattggaggttatcaatagctttacttacaataccttccgttgcaacgcttgtgatcgtggttctattggctttgcctatcactgtaggatggaggtatgcaactttttcaagcttgatgtaaggtgcgctttaatttctgagccgtttgattacaaaggtcatgaagatcccttgttcctagctttaaacccagaaataaaacccatatgtcatatatgcaaaacagaatgtttaaaacaattaaattgcatcaaatgcaatttcattgtatgttttaagtgtgttaccttaccatacaaaataaaatataagcatgacacacacttcctcacaatttcatttggtgaagaagtacgtgagcaagaatggtgtgaaatatgtgaacgtagtttaaaggatacatgcacaaaagtattctactggtgcaacgagtgttgcaccacttttcatattgaatgcttaattggtggagacccatatatcaagcccggtcaatatttcaataaatgggtatgcagggttcaagttcttcccaaatgtaatatttctcgaccattatgtggttcttgcaagaaccgttgtatagggaaaatatatgatgtaggctaccgtgttgaatgttcatatgaatgtatttaa

SEQ ID NO: 1148 - protein, 609 aa, Arabidopsis thaliana
MDSSVGGFYEVEKDGNLVLVYHHPKYCPIPQTQTVTSSSDLQPLFLCPRSRRRKIKSYSDTYPLNSSPEYVLSTTTTSHDHHVLPLFWCNNKEFDADGGCYICEGSNSGTDYYFCNYCSIKLHKECIQSPLIIKHPYHPEHYLQLFFHDDNFRKIECLCCGRKAHWLIYHCTTCQAFMHPICAMKPIPFLIDPPKKHIHPLTFFPRQTSLTCNVCGLLRKIYPTYVCFRCNFVTHNDCMNSPHIIKISRHRHRISFTFSLTSREWFCGVCRLSINVDYGAYTCDTCSDYVVHSICALGKDVWDGKELEGIPEIIDITENDGPFEVISEGVILYFHHNHHLRLEVSNVYDENMLCQACAIPIYEGNLYVCMECDFILHETCAKAPRRIQHALHPHPLVLEVINSFTYNTFRCNACDRGSIGFAYHCRMEVCNFFKLDVRCALISEPFDYKGHEDPLFLALNPEIKPICHICKTECLKQLNCIKCNFIVCFKCVTLPYKIKYKHDTHFLTISFGEEVREQEWCEICERSLKDTCTKVFYWCNECCTTFHIECLIGGDPYIKPGQYFNKWVCRVQVLPKCNISRPLCGSCKNRCIGKIYDVGYRVECSYECI

SEQ ID NO: 1149 - DNA, 1620 bp, Arabidopsis thaliana
  CDS (1)..(1620)
atggatcaaccaaagcaaaaagtgaagattccctgcaatcatccgttagaatacatacaactgaagggtggaggatggcccggatcatatgactatgatataaatacttgcgcaggatgcgatgaagattatggcttctgctactactgcgcaagctgcagttttcgagcacattcggaatgcatcgagtggccagacaccatcgaccacccgagtcactccagacatcctctcaagaaagtctcccccgggacaattgactatacagatggcaaatgccatttttgtagagaagaacttgttgatcccatgtatcactgttccttgtgcaacttcagcgtagatgtgaattgttggaggcatccgccacagcgtactatttatcaaccaaagagccacgagcatacattcaccctcatgccgagaaagatcacattcacttgtaacgcatgtgggatgcttgactgcattgatttgccccgagtgatcaacatcaaccgtcatgaccaccgcatttctcgcacttatcatctcggccacggcgattgggatttatgtggactttgtcgcaaagagatagattggagttttggagctttcacttgcaagcgttgtcctagttatgctgttcattcaaagtgtgcggtaaggaaagatgtgtgggatggagaagaactcgaagatgtacctgaagaagaagaagaaattgaagatccatacaaggtaataaatgataaagaaatcattcattttagtcatgaagaacatagtctaagacttggcggtgatgataatgttaccggttatgaaaagatgttgtgcgacgcttgcatcactcccatcagttctgatccatttttcaaatgtgtgcaatgcgagttttttcttcataaagaatgtgctagtctccctcggaggaaacgaagtatcttgcacatcgacaagcttgatctaagggtaaaaaataaggctggcaaccattacaagtgtagaagttgtcaaaaattattcgatggcttcaggtacaagacaacgtttgataaatttgatgtgcggtgtggatccatttctgagccttttcaccatgaactgcatccccatcctttataccacatcttttcaccagaagagaagtctcatatttgtggagcatgtgatagacctacacagtatgtcttaagttgtactgtgtgtgagtttcatttaggcatggattgtggcactttaccaacaaaagtgaaacatacatgcgacggtcatgacttatcgttgcatcatggagctggaaacaccgacggtccattgtggtgtgatatttgtgaggaagagacagatccgagcgtatggttttatggttgtgatgattgtgtgtccactctccatatcaaatgtgtacttggagacatgtatcacttcaagccaggaaacaaatacggcaaagctgaactagttgccaacgatggtatgactagacctttttgcatagtttgtgaagagcgttgcatgttcccttcctttcttaaggctaccgtttcagattcaactcttgtatacgcttgttcaatgaactgtgcatacgatagctactggaagaagtggtattatgacgaatctggttaa

SEQ ID NO: 1150 - protein, 539 aa, Arabidopsis thaliana
MDQPKQKVKIPCNHPLEYIQLKGGGWPGSYDYDINTCAGCDEDYGFCYYCASCSFRAHSECIEWPDTIDHPSHSRHPLKKVSPGTIDYTDGKCHFCREELVDPMYHCSLCNFSVDVNCWRHPPQRTIYQPKSHEHTFTLMPRKITFTCNACGMLDCIDLPRVININRHDHRISRTYHLGHGDWDLCGLCRKEIDWSFGAFTCKRCPSYAVHSKCAVRKDVWDGEELEDVPEEEEEIEDPYKVINDKEIIHFSHEEHSLRLGGDDNVTGYEKMLCDACITPISSDPFFKCVQCEFFLHKECASLPRRKRSILHIDKLDLRVKNKAGNHYKCRSCQKLFDGFRYKTTFDKFDVRCGSISEPFHHELHPHPLYHIFSPEEKSHICGACDRPTQYVLSCTVCEFHLGMDCGTLPTKVKHTCDGHDLSLHHGAGNTDGPLWCDICEEETDPSVWFYGCDDCVSTLHIKCVLGDMYHFKPGNKYGKAELVANDGMTRPFCIVCEERCMFPSFLKATVSDSTLVYACSMNCAYDSYWKKWYYDESG

SEQ ID NO: 1151 - DNA, 1770 bp, Arabidopsis thaliana
  CDS (1)..(1770)
atggatggaggtaacccaagatgtccgttatctcatccaactaaccctcacaccctctctaaatccggccaaatcaccaagtttggttgttttacatgcggtaaaaaagcaccgctcagcaaaagagaccgtcgcttctcttactactgcatcacctgtgatgtgagtttccacaaaggatgtcacatttttccgaggaagttaacacatccttatcaccttcagcaccctcttactttcacctttccggattatgaaagcgggatcacatccgacagcttcgattatgaaacctatcgcactgcagtaaagtgtcactctcaattcatcatcacatatagtcttaagaagcctggatctatagaatgctcatggtgcggcaaaaatatcgaagacgattgtttctatcgttgttctatatgtaacttctatttggatctctcttgctcccaaagtattccacttctcctcgttgcaaacccaaagagtcatcagcatccactcgtgttctacaggcgaccactcttgactccatgtgatgcgtgtgggttagtcaatgtgttggatccaagctatgcttgttttcaatgtaattatatggtccatcaaagttgcatagacttacctcgagtcataaagatcacgcgtcatcggcatcgtctttctcacattccttgcgtccaatctccggtttcaccatgtggggtatgctatcagaaagttgaaaacaagtacggcctatattcttgcaaccgctacgaagatcactcttatgtagtgcattcgaaatgtgccacgcatgaaaatatatgggacgggaaagaactcgaatgggaacctgaggaacccgaaaacattgaagatatcctcccatttaagaaggttggtactgatatgataaagtatttctcgcatgaacataatctgaagctcgagaagtatgatgctgttcgtgatgcagagaagctatgtcaagcatgcgtctgtcctatcaactctcgtgatttctacaattgcatccactgtgatttttttctccacgaggtatgtgctggtcttcttcgaaaattggatcatgcgttgcacaaacacactcttatcctagacccatatcctcgagacagttattatctcttggactgtcccatttgttccagaggatccactggtttcaggtacatatgttccataagtaattgtaattcccatcgaattggcatagatattcgatgtattttagttccagatcatttcactcacgagagtcatgaacatcctctatttatctccacatccttcaaagcagaaattcgttgccagggttgtcagaaggagtgcatgcagtcttacctgcagtgtactatatgcatatttatcatgtgttataaatgcgctacaattccaacggaagttagctacaaacacgacaagcatcctctttctctatgctatggagagaaagcagatgatacgtactggtgtgaactatgtgagaaagaggttaatccaaggaattggttctacacatgcaacatatgttgtatcactatccaccttcattgcatcttcggatcttctagttatatgaagcctggttccatatttgattacaactattccaaattggaagttcttcgcaacagtaacagcactcgaccgcaatgcacccgatgtggtgatcgttgtccaggttacatctacttcaaacgcaaacgcgataaacaccctgtaacgttttcctgttctgtgcaatgtttagagggaggatga

SEQ ID NO: 1152 - protein, 589 aa, Arabidopsis thaliana
MDGGNPRCPLSHPTNPHTLSKSGQITKFGCFTCGKKAPLSKRDRRFSYYCITCDVSFHKGCHIFPRKLTHPYHLQHPLTFTFPDYESGITSDSFDYETYRTAVKCHSQFIITYSLKKPGSIECSWCGKNIEDDCFYRCSICNFYLDLSCSQSIPLLLVANPKSHQHPLVFYRRPLLTPCDACGLVNVLDPSYACFQCNYMVHQSCIDLPRVIKITRHRHRLSHIPCVQSPVSPCGVCYQKVENKYGLYSCNRYEDHSYVVHSKCATHENIWDGKELEWEPEEPENIEDILPFKKVGTDMIKYFSHEHNLKLEKYDAVRDAEKLCQACVCPINSRDFYNCIHCDFFLHEVCAGLLRKLDHALHKHTLILDPYPRDSYYLLDCPICSRGSTGFRYICSISNCNSHRIGIDIRCILVPDHFTHESHEHPLFISTSFKAEIRCQGCQKECMQSYLQCTICIFIMCYKCATIPTEVSYKHDKHPLSLCYGEKADDTYWCELCEKEVNPRNWFYTCNICCITIHLHCIFGSSSYMKPGSIFDYNYSKLEVLRNSNSTRPQCTRCGDRCPGYIYFKRKRDKHPVTFSCSVQCLEGG

SEQ ID NO: 1153 - DNA, 2133 bp, Arabidopsis thaliana
  CDS (1)..(2133)
atggaaaaagaagaagtatctctacctcttggatacaatcaccaaagcagcagaaagatggacaaagaagaagtatctccacttcctccgcctcttcctcctcttggatttggacgatatcaaaccagaaaccacaaaaagatggacaaagaagaagtatctccacctcctccgcctcttccgctttttggatatggacgatatcaaaccagaaaccacaaaaagatggacaaagaaaaagttcctccacctccttcacctcatccacctcttcactcccttccatcaagcaaacctgaagtaaaacctcaccctcgtcctacaggaaacccaatatgtcctgtgtctcatccaagtcaacctcacaccctctctcttagatctggcagaaacaccaagtttgattgtttttcatgccgtaaacatatgtctcccttgacttaccataattaccattactactgcaagacgtgcgatatggagtttcaccatggttgtcacacgtttccaaggaagttaacacatccttatcacctccaacaccctcttactttcaccttcaggaacaatgaaaccggattcctatctgatggcaatatagatgtatccttttccactacactttcgtcctactccaacctgcctggatccaacaaatctgatcataacaagtttgaatctacggaatctgatcaatgcacatggtgtggaaaatatatccaaggcaattggttttatcattgtcctatatgcaacttttgtttggatctctcttgctcccaacaaagtgttccacttctcctcgtcgcgaaaccaaagagtcatcaccatccactcgtcttctacacgcgaccactcttgactccatgtgatgcgtgtgggttggtcaatgtgttggagccaagctatgcttgttttcagtgtaattacatggtgcatcaaagctgcatcgacttaccacgagtcataaagatcacgcgtcacgagcatcgtcttcatcatactccttacctccgttccacaatttcaccatgccggatctgctaccaaccagttgacatcaagtacggccaatattattgcaaccgcgagaattgctcttatgtagttcattcaaaatgtgcaacacatgagaacatatgggacaggaaagaactcgaatgggaacccgaagaatctgacgaaattgaagatatcatgccatttaagaagttcggtagtgatatgataaagcatttctctcatgaccatcttctaaagctcgagacatatgatggtgctcgagatgcagagaagcaatgtcaagcatgcatccttccgatcaactctcatgatttctacaattgcatggaatgtgattttttcctccatgaggtatgtgcttgtcttcttcgaaagctgaaccatgcgttacacaaacacactcttatcttagatacctctcctcaaaaccactatgatctcatcaattgttcagtttgttccagaaagtccactggtttcatgtacagatgttccgaaactgattgtagattattaaaagatcaagttcttcagatagatgttcgatgtattttagttcttgattatttcacccatgaaagtcatgaacatcctctattcatctgcacatcctccaaaggtgaaaacaagatttgttgcgagggttgcaaggagatttgccagcagccttacctacagtgtacaaggtgcaaatttgctatgtgttatcaatgcactaccgttccaactgaagtatgctacaaatacgacaagcatcctctctctctttgctatggagaacaagcagatgatatgtattggtgtgaaatatgtgagaaagaggttaatccagcggactggttctacacatgcaacatatgttgtatcactatccaccttcattgcatattcggaaattctgtttatatgaagcctggtttaacatttgaatatggcttcactagtaaagtggaagttcttcgcaatagtaacagcactcgaccgctttgcgttagatgtggtaatcattgtccaggttacagctattattgccatataggcagctacggtcaatggacacttaaaagtgttacttgttcgttgaaatgtttggagccttatttgtattaa

SEQ ID NO: 1154 - protein, 710 aa, Arabidopsis thaliana
MEKEEVSLPLGYNHQSSRKMDKEEVSPLPPPLPPLGFGRYQTRNHKKMDKEEVSPPPPPLPLFGYGRYQTRNHKKMDKEKVPPPPSPHPPLHSLPSSKPEVKPHPRPTGNPICPVSHPSQPHTLSLRSGRNTKFDCFSCRKHMSPLTYHNYHYYCKTCDMEFHHGCHTFPRKLTHPYHLQHPLTFTFRNNETGFLSDGNIDVSFSTTLSSYSNLPGSNKSDHNKFESTESDQCTWCGKYIQGNWFYHCPICNFCLDLSCSQQSVPLLLVAKPKSHHHPLVFYTRPLLTPCDACGLVNVLEPSYACFQCNYMVHQSCIDLPRVIKITRHEHRLHHTPYLRSTISPCRICYQPVDIKYGQYYCNRENCSYVVHSKCATHENIWDRKELEWEPEESDEIEDIMPFKKFGSDMIKHFSHDHLLKLETYDGARDAEKQCQACILPINSHDFYNCMECDFFLHEVCACLLRKLNHALHKHTLILDTSPQNHYDLINCSVCSRKSTGFMYRCSETDCRLLKDQVLQIDVRCILVLDYFTHESHEHPLFICTSSKGENKICCEGCKEICQQPYLQCTRCKFAMCYQCTTVPTEVCYKYDKHPLSLCYGEQADDMYWCEICEKEVNPADWFYTCNICCITIHLHCIFGNSVYMKPGLTFEYGFTSKVEVLRNSNSTRPLCVRCGNHCPGYSYYCHIGSYGQWTLKSVTCSLKCLEPYLY

SEQ ID NO: 1155 - DNA, 1542 bp, Arabidopsis thaliana
  CDS (1)..(1542)
atgaatctgttaggcactagaaacatgatgactctgtctaagagatcttcgaagacgaagactggttctgtttggttttcgtatctagaggaacatctagtaaatgtacacatatttgaagaatctccacgcgattctagagatgcaatttgcaaattgtgtaaaagtacggtttcttttgaatctttcgcatattattgtcgtgaatgtagatcccatttccataaggattgtctcacaataatcaatgcaaagattcatgagcatacactaactttcattcgtagagagaatccgttcccttgtgatgtttgtgggagggatgataaaggtatggatatgtacggatgtttacaatgcgatttctttgtacatagacagtgtatattcctaccaaaggttataaagctcacacgtcactcacagcgtctctctcacgtttttcgtatctctgatggtgataacatttgtggagtttgccggagccaagttgatgttagatatggaggatattcttgtattgagaagacatgtaattatgttgtccattcaagctgtataattcgttttgatgtgtgggatggcaaagatcttgaagaagagcctgaaccagaggagattgactctcaagttgatcttgctgcgttggtggaaatagatggaaaatcagtacgccattttagccatgaacatgatttattgagactcgatatgggcgaaaaagaagaaagtggacaagtatgtcaagcctgtgtccttccaattgaatttggtagtttcttgggttgcaagcaatgcgactttgctcttcacgacgtgtgtgcgagtcttcctcggaagatggaacatgggatacatattcatccgcttaccatacatgttgacgcgatgaacaacgaaaatgggttcttcacttgctctgtatgtaaccaacattcttgcggattcatgtacaagtgttgccaagaagattgtgagtttaaaatagatgtgaagtgtgcttcttttgccgaaccattcgaccatagtatgcataaacatcctctttatctggctatatactttgatgaatttatttacaggtgtgaaggttgcactcaatcttcaagatttgcagcaaaatgttacaaaggatgctggtttcccttggagttcaaatgcttgaatttaccaaaactggtaaaatacaagtatgactcgcactcactcactctatacagtgataaatattactcgaagagttttcagcttgagtggtggtgtgagatttgcgaagaaaatataaacaaaaagaaacttttctacacctgccatgaatgctgcacgactctacatgttgaatgcatcttagggaaatacccttatttgaagtctggccataggatcaaagttagtggtttggaggtcgagattgcttcaaacaatggtgtttctcggccggtgtgtcatacatgtcaccgtatttgccaagacaaaaaaaaatttaatggaaaagatgatgtatatttttgttctatcaagtgtattcattctaccaaatga

SEQ ID NO: 1156 - protein, 513 aa, Arabidopsis thaliana
MNLLGTRNMMTLSKRSSKTKTGSVWFSYLEEHLVNVHIFEESPRDSRDAICKLCKSTVSFESFAYYCRECRSHFHKDCLTIINAKIHEHTLTFIRRENPFPCDVCGRDDKGMDMYGCLQCDFFVHRQCIFLPKVIKLTRHSQRLSHVFRISDGDNICGVCRSQVDVRYGGYSCIEKTCNYVVHSSCIIRFDVWDGKDLEEEPEPEEIDSQVDLAALVEIDGKSVRHFSHEHDLLRLDMGEKEESGQVCQACVLPIEFGSFLGCKQCDFALHDVCASLPRKMEHGIHIHPLTIHVDAMNNENGFFTCSVCNQHSCGFMYKCCQEDCEFKIDVKCASFAEPFDHSMHKHPLYLAIYFDEFIYRCEGCTQSSRFAAKCYKGCWFPLEFKCLNLPKLVKYKYDSHSLTLYSDKYYSKSFQLEWWCEICEENINKKKLFYTCHECCTTLHVECILGKYPYLKSGHRIKVSGLEVEIASNNGVSRPVCHTCHRICQDKKKFNGKDDVYFCSIKCIHSTK

SEQ ID NO: 1157 - DNA, 1959 bp, Arabidopsis thaliana
  CDS (1)..(1959)
atggagatagatcatgaacttttaatcccacatttaatgatggaggaaccaactgtgaaagaagaagacataattcacaaccaaaccagtactaaagaaatgtatgatgcagaaaaaccaagatgccttctgtctcatccagctgactctcctcacaacctgtccgttggatgcgatcccaaacttccgcttggctgctttacgtgcggcggaaaaacaactgtgcggcggcaagattatctccacttccactgcaccacctgcgacgtaaagttccacgaaggttgtcaaacgcgtccgagaaggataacacatccttatcacctccaacaccctctcactctcttctatcgaaaccctgaaaccggaattatatccaacatcatcccctactccagcccttacgaatccgacacatctgatccagaatccaactcatctggtgaagggaagtctgaacttgtcgatattattccgtccaaatccgatatcatttttgacaagtgcacttggtgtggaaaagatttcaaaggtgatgtttggttctaccgttgtttgatatgtggcttttgtttggatctctcttgtgccttaactcttccacctcttactattgcaaatccgaaaagccatcatcactcactcctcttcttacctcggcctttattagttccatgtgatgcttgtgggttggtcaacgcgttggaaccaagttatgcttgttttcaatgtaattacatgatccatcagaattgcatagatctacctcgagtcataaagatcacgcgtcaccatcaccgtctttcttttactcctttcgggccacctctgatttctttatgccgggtttgctacaaagaggttgatatcaagtatgggcaatattcttgccagcacgaagattgttcttatgtagctcattctaaatgtgcaacacataaaaatgtttgggatgggacggaactcgagtgggaaacagaagagtccgatgaaaatgaagatattgcgccattcaaggtggtcggtgaagatttgataaagcatttttgtcataaacatcacctacggctcaagaagcacgatggttttcgagaagcagagaagcaatgtagagcgtgtgtatttccaatcgtctctcatcaattctatcattgcaagatatgcaattactctctccacgaggtatgtgctggtcttcctcgaaaacttgatcatgcattgcacaaacaccgtcttgtcctagacccatctccgctacatgactacagaaacatgcattgttcaacttgttcgcgagcgttcacgggtttcagatacaaatgctcagaaaagatttgccaagaccgcacaaatctcaatatagatgttagctgcattttggttcccgagtatttcacacataaaagtcatgaacatcccgttgtcatctccacatcctatagcgacacagatgagatcctctgtaatgcttgtcaggggacatgttggcaacctcatataaagtgtactaaatgcgattttgctatgtgttatacatgtgctaccattccaaacgaagtacactacaaattcgatgagcatcctcttacattatgccacggagaaagcagaaagagcaagtactggtgcgaagtgtgtgagaaaaaactagatacaacaaaatggttctacacatgcaacaaatgctgcactactgtccaccgtgaatgcttattcgggtcaactgtttatatgcagcctggttccagattcaactacgtatacggaacggtggaagttttccgcaacagtcataacagtcgactggtttgtcgtaaatgttttcattcgtgcacagattccgtctacttcagaggctacaagtcccaacagacgtttatttcatacaaaggctacgagcagcatgagatggctatttgttctttgacctgtttaaaactagagatgctcttctggtag

SEQ ID NO: 1158 - protein, 652 aa, Arabidopsis thaliana
MEIDHELLIPHLMMEEPTVKEEDIIHNQTSTKEMYDAEKPRCLLSHPADSPHNLSVGCDPKLPLGCFTCGGKTTVRRQDYLHFHCTTCDVKFHEGCQTRPRRITHPYHLQHPLTLFYRNPETGIISNIIPYSSPYESDTSDPESNSSGEGKSELVDIIPSKSDIIFDKCTWCGKDFKGDVWFYRCLICGFCLDLSCALTLPPLTIANPKSHHHSLLFLPRPLLVPCDACGLVNALEPSYACFQCNYMIHQNCIDLPRVIKITRHHHRLSFTPFGPPLISLCRVCYKEVDIKYGQYSCQHEDCSYVAHSKCATHKNVWDGTELEWETEESDENEDIAPFKVVGEDLIKHFCHKHHLRLKKHDGFREAEKQCRACVFPIVSHQFYHCKICNYSLHEVCAGLPRKLDHALHKHRLVLDPSPLHDYRNMHCSTCSRAFTGFRYKCSEKICQDRTNLNIDVSCILVPEYFTHKSHEHPVVISTSYSDTDEILCNACQGTCWQPHIKCTKCDFAMCYTCATIPNEVHYKFDEHPLTLCHGESRKSKYWCEVCEKKLDTTKWFYTCNKCCTTVHRECLFGSTVYMQPGSRFNYVYGTVEVFRNSHNSRLVCRKCFHSCTDSVYFRGYKSQQTFISYKGYEQHEMAICSLTCLKLEMLFW

SEQ ID NO: 1159 - DNA, 2415 bp, Arabidopsis thaliana
  CDS (1)..(2415)
atgatgaatccagaatccgatcatccttcatctcctcgtcaacgtaagattggaatcgccgtggagctctctgaagaaagtgccttcactgttcgttgggctgttgataactacatccgtcagggagacgacatcattattctacacgtctctccaaccgccggtctctttggagccgattggggatattaccctctccaaactcaacctccttacaccaccgcttctattttctccaaagtagcggatctcgggaagccattgaaggaagctggattccctcacacgattcatacagtcaaagattacgataagagagagaggctttgtcttgagactcaacggctcaatctcactgctctgattatgggatttggtgatggctctgttagtgatttctgtgttcaccactgtgtttgtcaagtcgttgtggttagataccctgatggtcctggcagtgttgaaggtactcgggcagcgcctattgtaactttcaaatcacgtacggatgatgacgaagagatagataaggctaagactgctctgactgcttctgttcatcatcaacacatcaaagccatggattcggtgtcaaagcagcctcttctcttttgccctcgtgcatattttactaacaatgaagaagattttcgcgcgatgcaattccgagagccaccaaatctttcatctccatcttttcacctcacctccttagttttgggcaacgactttaacataacacgcaaatactactacgacagacatggcaagggcttcattaaaggccatagacctaacaaacaatgtgaaatatgctccaagtcattactcggtaccacgttttattcctgcacgttatgtctccgtccttcatgttcccctcttcaatcttcagtattatcacgctcttcaggctactaccacgaagcctgtatcgagccgatatcaaagcacccatatcatcctaaacatgctctccgatttcgttatgaatcaggtcagatatgcttatcttgttcaacttttaaggattttgcttaccattgctctatatgcaattttaccatgtgtcaagattgtgctagagagccaccactctttgcaatagactatccaaaaaggcatgagcatacactcttctactttcaaaggaaaggctccttgatttgtgacgtttgtgggttgagtgatggcaggtctttgctgtattcctgtgtcaagtgtaattttgtagtccataaagagtgtgtctattttccatgcatcataaaaatatcacgtcatgaacatcgtctctccttcaattcttcacttactcctgaacaatggttatgtggagtgtgtcgtgaaagcatagacacaaattttgcaagatattcttgcgtaaagggttgcagtttcgcggttcattctaaatgtgcaacgcgaaaagatgtatgggacggaaaagaacttgagggagaaccagaagaagatgaatctctatatatttttaagtcgttcaatgagataagtgatggaattatagaatattttcgtcacaaaagtcatcatatgagactggacgaggataccaacagagcatttgacgaggataaacgttgtcgagcatgcacgtttcctatctgtgatgatcttatttacagttgcatgcaatgtgattttatcctccatcaaacatgtgcacatcttcctccgaggaaacaacatgcgacacatcctcatccccttcttctactggtggatgaggaacatgaagattattttcaatgcactgcttgtaagcgtgaaagcaatggttttgcgtacacatgttgtgctagggattgcaacttcacattagacgtatcttgcgcttctatagctgagtcattgattcatcggtttcatccgcatcctatttatttaatacatgaatccacagcgcaagagttctgttcgatttgcggacaactcataggtcatcgtctaaactgtggagaatgtcgttttgctttgtgttttgggtgcgccactttacccaataagttgaggtataagcatgatgaacattttctcatattttcttatgatgaagacttcagtggttcacaagaaagtggtccgcatttgtgtgaagtttgtgaaaaacaagcaaatccgaagaatggagtttatatgtgcaatgattgtaacgtcacactgcatgttgaatgtcttcttggaaaggagatgtatatgatgcctattggagggctcatttcccgtaacgtaaatgttgatattcttcccaataatcgtctcactcgcaacatatgccaacgttgccataatcgttgtcaaggaaaaataatcttcaaagcacgtgacagatcaacatttttatgttctttgttttgttgtctgacgaagagttgggtggacagagacacatag

SEQ ID NO: 1160 - protein, 804 aa, Arabidopsis thaliana
MMNPESDHPSSPRQRKIGIAVELSEESAFTVRWAVDNYIRQGDDIIILHVSPTAGLFGADWGYYPLQTQPPYTTASIFSKVADLGKPLKEAGFPHTIHTVKDYDKRERLCLETQRLNLTALIMGFGDGSVSDFCVHHCVCQVVVVRYPDGPGSVEGTRAAPIVTFKSRTDDDEEIDKAKTALTASVHHQHIKAMDSVSKQPLLFCPRAYFTNNEEDFRAMQFREPPNLSSPSFHLTSLVLGNDFNITRKYYYDRHGKGFIKGHRPNKQCEICSKSLLGTTFYSCTLCLRPSCSPLQSSVLSRSSGYYHEACIEPISKHPYHPKHALRFRYESGQICLSCSTFKDFAYHCSICNFTMCQDCAREPPLFAIDYPKRHEHTLFYFQRKGSLICDVCGLSDGRSLLYSCVKCNFVVHKECVYFPCIIKISRHEHRLSFNSSLTPEQWLCGVCRESIDTNFARYSCVKGCSFAVHSKCATRKDVWDGKELEGEPEEDESLYIFKSFNEISDGIIEYFRHKSHHMRLDEDTNRAFDEDKRCRACTFPICDDLIYSCMQCDFILHQTCAHLPPRKQHATHPHPLLLLVDEEHEDYFQCTACKRESNGFAYTCCARDCNFTLDVSCASIAESLIHRFHPHPIYLIHESTAQEFCSICGQLIGHRLNCGECRFALCFGCATLPNKLRYKHDEHFLIFSYDEDFSGSQESGPHLCEVCEKQANPKNGVYMCNDCNVTLHVECLLGKEMYMMPIGGLISRNVNVDILPNNRLTRNICQRCHNRCQGKIIFKARDRSTFLCSLFCCLTKSWVDRDT

SEQ ID NO: 1161 - DNA, 2769 bp, Arabidopsis thaliana
  CDS (1)..(2769)
atggatccggaggcgaagctcatactactcatcttgagattcaatgctttgaaaagctatataaactcggatccagaagaggtcatgtcagtgattagtcaaataatctctctggttaagtcaatggtgacggagacggagacggagctgatgtcactcatctctgaaacaatcgattttttcaaggagatggatttggagtcccagccgaattcgctaaggaagctcatatcactcatttctcgaacgcatttcgtcaactcttcagattgggaggagccggttccggagtctacgctcatgtcactaatcaaggaaacatggagtatgaagccgcagccggagctcatatcactcattcagaaaataatatccctcgtcgacaactctccggagctgaagctcaaatcattcattactcaactaatctttctggacgataatttgtctgagagactgaattggaattactctcggaggttcttgtcactcagtagatatataatctctctggccacctcagtggattggaatttgcagccgaagcccgagtcggagctcatgtcactcactaatcaatctatctctgtcttcaactctatggatgttgattctcagcccgagcccctacggaacctcatatcactcatatcactcgcttctttcagatcctctcccaccaacttaagatattcgaagccgaacatggtggatatcttgaacctttttaaagacaagacggttgagtttgaaacgggctcacttacgaaaagagttgtatggaagtctctcaataagaagctttttctactggttacggaaacattgagtctcgacccggagccgaagctcatatcactcatccatcgtatattctcccacgtcctgtctatgaattcaaagtggaagaatcttatttccctttgccctcaagtacaagtcatattgaaaaagggaaaatttcatgtgattgaacaaggcttatggaccaggaatcaaaagtgggacgatccagtgagcgacgacgactcaactgaagcacgagtagtctcctggagaaagaataagtgggactgtcttccttttaactgggataagttcatgttaactgaagaaaaagatgatacccattttgtctgccgaggttgctatggagagaaccatgaagataatagcaaggctccggtcgagatcaaacaccctcttcatcctaaacattctctccagcttgccttgttcaatgatgacaaaaccaggcaatgctattgctgtcacgaacttctccgtgacgataccgcaagtatgttttatttttgctctccttgcgattttgggctcaagtttacatgtgccaagaaatcaccagtcttgtctattgaccaacccaagtggcatgagcatacacttgccctgtttccaagtcaagatccccaaacttgcagcctatgcgccttgaaacattcaaatttggtgttctatatatgtcccccttgcgactttattatccatcaaagctgtttcagcttacctcatgtcatacggatttctcgccacctccattgtatctcttttacccattctttccgaaaaggagattggatttgtggtgtttgtcgccggaagattaacaatgattacgggggatatcattgcatcaagaaaggttgtctttatgcggtgcattcaaaatgtgccactcaaccaaatgtttgggatggtatagaacgtgaaggagagtcagaagaagaagtggaagaacttgagccattcctgacgataagcgatggaatcatacagcatttcagtcatgaacatcatcatttgacacttgatgagaacaacggcaaagattacgacgagaataagctgtgtcaagcatgcatcatgccaatttattttggtaactcctactcttgtttgcaatgtgatttcattctacatgaagaatgtgcaaatctctctcgcagattacatcatccaatacatccacatctactcactttaatatcagataaccctctcagagatgttgggtcttggaataattctgatcgtgattactgttcagcttgtccttcgttgtgtatatctggtttcttctataagtgcagtaaaatagattgcgattttaggctacatgtgcagtgcgccacaatttcagagcctttacttcatccaagtcatatgcatcatttattcctaacatccaaaccaaatgaggaaagaaactgttcggtttgcgccaaagcgccaggcgagtacaccaaggaaaccttcaattgcattgaggaggagtgtgactatgctttgtgtttcaaatgtgctactttaccacaacaagtgaggtataagcatgataaacacatactccctctttcttatgggaagaagacaagtgacatgacgtattggtgtgaagcttgtgagggaaaaataaatccagaagaagggttttataggtgtgatgagtattgttgtgtccacctacacattacatgtttgcttgggaaggacttatacttgaagcctcgttcatcctggtctctctcatgtggagcgctattgattctgcctaactatctgtggatgtctcgacctatttgctcctcctgtggtaatcgttgtcctcagagaatatttttatttttactctcaggtgcatctttcttctgttctgtgtattgtattcccacgacgcgtgaactgggtttcttcccgggattggaagctggcgagttagctctgatacttagttcttttcgttcctga

SEQ ID NO: 1162 - protein, 922 aa, Arabidopsis thaliana
MDPEAKLILLILRFNALKSYINSDPEEVMSVISQIISLVKSMVTETETELMSLISETIDFFKEMDLESQPNSLRKLISLISRTHFVNSSDWEEPVPESTLMSLIKETWSMKPQPELISLIQKIISLVDNSPELKLKSFITQLIFLDDNLSERLNWNYSRRFLSLSRYIISLATSVDWNLQPKPESELMSLTNQSISVFNSMDVDSQPEPLRNLISLISLASFRSSPTNLRYSKPNMVDILNLFKDKTVEFETGSLTKRVVWKSLNKKLFLLVTETLSLDPEPKLISLIHRIFSHVLSMNSKWKNLISLCPQVQVILKKGKFHVIEQGLWTRNQKWDDPVSDDDSTEARVVSWRKNKWDCLPFNWDKFMLTEEKDDTHFVCRGCYGENHEDNSKAPVEIKHPLHPKHSLQLALFNDDKTRQCYCCHELLRDDTASMFYFCSPCDFGLKFTCAKKSPVLSIDQPKWHEHTLALFPSQDPQTCSLCALKHSNLVFYICPPCDFIIHQSCFSLPHVIRISRHLHCISFTHSFRKGDWICGVCRRKINNDYGGYHCIKKGCLYAVHSKCATQPNVWDGIEREGESEEEVEELEPFLTISDGIIQHFSHEHHHLTLDENNGKDYDENKLCQACIMPIYFGNSYSCLQCDFILHEECANLSRRLHHPIHPHLLTLISDNPLRDVGSWNNSDRDYCSACPSLCISGFFYKCSKIDCDFRLHVQCATISEPLLHPSHMHHLFLTSKPNEERNCSVCAKAPGEYTKETFNCIEEECDYALCFKCATLPQQVRYKHDKHILPLSYGKKTSDMTYWCEACEGKINPEEGFYRCDEYCCVHLHITCLLGKDLYLKPRSSWSLSCGALLILPNYLWMSRPICSSCGNRCPQRIFLFLLSGASFFCSVYCIPTTRELGFFPGLEAGELALILSSFRS

SEQ ID NO: 1163 - DNA, 1473 bp, Arabidopsis thaliana
  CDS (1)..(1473)
atgttttatttttgttctccttgcgattttgggctcaaatttacatgtgccaagaaatcaccagtcttgtctatcgaccaacccaagtggcatgagcatacacttgctgtgtttccaagtcaggatccccaaacttgcagcctatgcgccttcaaacattcaaatttggttttctatatatgtcccccttgcgactttatcgttcatcaaagctgttttagcttacctcatgtcatacggatttctcgccacctccattgtatctcttttacccattctttcccaaaaggagatggtatttgtggtgtttgccgccggaagattaacaatgattacggggggtatcattgcatcaagaacggttgtttttatgcggttcattcaaaatgcgccactcaaacaaatgtttgggatggtataggacgtgaaggagagtcagaagaagaagtggaagaacttgagccattcgtgacgataagcgatggaatcatacaacatttcagtcatgaacatcatcatttgacacttgatgagaacaccagcaaagattacgacgagaataagctgtgtcaagcatgcatcatgcctatttattttggtaactcctactcttgcttgcaatgtgatttcattctacatgaagaatgtgcaaaactttctcgcagattagatcacccgatacatccacatcaactcactttagtaacagataaccctctcagacctgtcgggtattcgattaattctgatcgtgatatttgttcagcttgtccttcgttgtgtatagctggtttcttctatgagtgcagtgaaagaaattgcgattttaggctacatgtgcagtgcgccagaatttcggagcctttacttcatccaagtcatatgcatcctttattcctaacatccaaaccagatgaggaaagaaactgttcggtttgcgccgaagcgcgaggttattacaccaaggaaaccttcaattgcattgaggaagagtgtgactttgctttgtgtttcaaatgtgctactttacctcaaaaagtgaggtataagcatgataaacacatactccctcttttttatgggaagaagacaagtagcatgacctattggtgtgaagcttgtgaggggaaaataaatcctgaagaagggttttataagtgtgatgagtattgttgtgtccacctacacattacatgtatgcttgggaaggacttatacttgaagcctcgttcatcatggtctatctctaggggatcgctattgattctgcctaactttatgggtatatctcgacctatttgctcatcctgtcataatcgttgtccacagagaataattttagtctcactttcatctttcttctgttccgtgtattgtatacccacaagaggtgaactgggtttctttcggggatttcaagctggcgaggtagctctgctaattagttctctttctgtcaagttgtctttctga

SEQ ID NO: 1164 - protein, 490 aa, Arabidopsis thaliana
MFYFCSPCDFGLKFTCAKKSPVLSIDQPKWHEHTLAVFPSQDPQTCSLCAFKHSNLVFYICPPCDFIVHQSCFSLPHVIRISRHLHCISFTHSFPKGDGICGVCRRKINNDYGGYHCIKNGCFYAVHSKCATQTNVWDGIGREGESEEEVEELEPFVTISDGIIQHFSHEHHHLTLDENTSKDYDENKLCQACIMPIYFGNSYSCLQCDFILHEECAKLSRRLDHPIHPHQLTLVTDNPLRPVGYSINSDRDICSACPSLCIAGFFYECSERNCDFRLHVQCARISEPLLHPSHMHPLFLTSKPDEERNCSVCAEARGYYTKETFNCIEEECDFALCFKCATLPQKVRYKHDKHILPLFYGKKTSSMTYWCEACEGKINPEEGFYKCDEYCCVHLHITCMLGKDLYLKPRSSWSISRGSLLILPNFMGISRPICSSCHNRCPQRIILVSLSSFFCSVYCIPTRGELGFFRGFQAGEVALLISSLSVKLSF

SEQ ID NO: 1165 - DNA, 2046 bp, Arabidopsis thaliana
  CDS (1)..(2046)
atgagttctgtgggtgtatttgataaggtggaaatggatgagaagtcatatttagtatacacattaacacaaacaaaacacccaacctcttccgccgtggagtctagtggtgatgaccttcctctccaacctcttttttcttgtccctatgcacgtatcagatctcataagttcaaagtagagaagaactatgatggtgttaactttttcaactttcatccattcaattcttaccctcactttccaagaacaagaaccagttatcaacaaggcgaatctttacttgattatgatcaccataacatctgtaagttccctgtagtccctctgttttggtgcaacaataaaacccctgatagtaatgaattcgagtgtggtggatgtgaagagtcaaagactagcagaagctattatgcttgtcttgaatgtggaaacaagtttcacaagcaatgtgtagagtctccacttgagatcaaacacccttcacacccttttcattctcttcgactttatagtcatccaacacatatggtgtgcatttgttgtggaagacttgtgtctaacatgttttatcattgtgtgacatgcgatttgagtatggacccgatttgtgctatggaaccaataccctttgttgtagaccatcctaaaagccatccccaccctattacctttttccctacacaagctactttggcttgcaatatttgtggccttgttaagatgcttgatcccacatacatttgtatccaatgtgtcttcgtcatccataaagattgtatgggttacccacatgtcattagaatatctcgtcaccaacaccggatctcttttgcctcttctctaccatatggaaatttgtcttgtggggtttgtcatcaacgtgttgacaacaattatggagcatattcttgtggtaaatgtgatgcttattttgttcattcaaaatgtgcatttcatagaaatgtgtgggatggaaaagaactcgaaggtgtatcagaagaagatgatataatagatgatggtgagccatttgagaggatatctgatggagtaatactccatccatatcacagtcaccatctacgacttgagatcagcaaagtttatgatgaaaataagtattgtcgagggtgttctttcccaatctacgaaggccagttctattcatgcatggaatgtgacttcatcctccatgaaagttgtgcaaatgctccacgcatgaaacgacatcccttacatccacatccacttactctaaatgttgccacaaaggagcttggtaataacgaaggcgtataccattgtaatgtttgtggtcgtgatggtactggcttcttctatgaacatcatataggcgaaagaagattccggctagacttgagatgtgcctcgattcgtgaaccatttgaatatcaatgccacaaacatcccttatgcatagcttcggagctagagaaaaaggtacgatgtcaaatatgcaaagggaaaagctattcgaaattaaattgcatggaatgcgattatattatatgttttcgttgcgctaccttcccatacaaggtaaggtacaagcacgacagtcattttcttagaattcgcgatgggaaaaaggcaagtgatgaaccagactggtgtgaggtttgcgaaggcaaaatagaagaagtaaaagaaagagagtctccgtgggacaaaagacgagaaatgcgattttataaatgcaatgactgttgcacgactcttcatgttgaatgtttacttgggagagacatgtacatgaaacctggtaatagtgtaaaagattacatttctaagcactcactaggaattgaaggtacgcaatggacagatgttcgagtctttctcaacagttcgctctcccgaccaatatgcaccggatgtatgcgccgttgtctattcccaatagttttcaaaggctacaacacaatcttttgttcttgggagtgtattggatatggcgacacagtgtttgagcatccaacaagtaatcctttttcctctatcgtagaattggagttaatgtga

SEQ ID NO: 1166 - protein, 681 aa, Arabidopsis thaliana
MSSVGVFDKVEMDEKSYLVYTLTQTKHPTSSAVESSGDDLPLQPLFSCPYARIRSHKFKVEKNYDGVNFFNFHPFNSYPHFPRTRTSYQQGESLLDYDHHNICKFPVVPLFWCNNKTPDSNEFECGGCEESKTSRSYYACLECGNKFHKQCVESPLEIKHPSHPFHSLRLYSHPTHMVCICCGRLVSNMFYHCVTCDLSMDPICAMEPIPFVVDHPKSHPHPITFFPTQATLACNICGLVKMLDPTYICIQCVFVIHKDCMGYPHVIRISRHQHRISFASSLPYGNLSCGVCHQRVDNNYGAYSCGKCDAYFVHSKCAFHRNVWDGKELEGVSEEDDIIDDGEPFERISDGVILHPYHSHHLRLEISKVYDENKYCRGCSFPIYEGQFYSCMECDFILHESCANAPRMKRHPLHPHPLTLNVATKELGNNEGVYHCNVCGRDGTGFFYEHHIGERRFRLDLRCASIREPFEYQCHKHPLCIASELEKKVRCQICKGKSYSKLNCMECDYIICFRCATFPYKVRYKHDSHFLRIRDGKKASDEPDWCEVCEGKIEEVKERESPWDKRREMRFYKCNDCCTTLHVECLLGRDMYMKPGNSVKDYISKHSLGIEGTQWTDVRVFLNSSLSRPICTGCMRRCLFPIVFKGYNTIFCSWECIGYGDTVFEHPTSNPFSSIVELELM

SEQ ID NO: 1167 - DNA, 1989 bp, Arabidopsis thaliana
  CDS (1)..(1989)
atgacttttaggctagaaggacacgagcatcgtgtatccattgttagctctggtgatagtttggaatgtgatgcttgcgatcgatcgtctggtgatgggttctcttgcagtgaatgcaagtttactgttcaccggaaatgtgcgtttgtgttcatgacagaagatatattccaccacccttctcatgatgggcattgtcttaaacttctcacaaccggagctcctgttcacaccgactcaaaatgccatctctgcggtaaaaacaccaaacaccttctttatcattgctatgattgtaaagtcaatttggacattgattgcatgattgatggcatatgtaccctagcccgtctgagtaagccatggcatccccatcttctactcatggttgattttagctctgatatgtggtgcgatttttgttatgagggtggcaaacatggctatttctgccctcgttgcaggttggtgattcatgagagttgtgtttccgtatttgactcaccagagattaatcatccttctcatctcagtcaccctcttaagcttatcaccaatggagctccagattacacggaagaccgaagttgtcatatatgtggaaaagaaactggaaacttactttatcattgcgatatttgtaagttcaacttggatatggaatgcgcggttgaaaatcccataccagtcgctctttcagatctcaaggtccatgagcatacactcacactcatgccaagattgatatccttcatttgtgatgcttgtgggacgaaaggcgaccgtgctccttacgtatgtgttcaatgtgatttcaggatgttccatcaaaagtgtgctcgtttaccacgtgtcattcatgttaatcaccatgatcaccgtgtttcgtacaagtatcctcttggtcctggagaatggagatgtggagtttgttgggaagagattgattggtcatatggggcttattcatgctctctttgtcctaattatgctattcattcactgtgtgcaacaaggaaagatgtatgggatggaaaagagcttgatggagtacctgaagaagttgaagatattgagccatttaagaggaatgatgacaacacgatcactcatttcgctcatgaacataaccttagcctccacaatgacgatgaagaaagcagcttatgtggagcatgtgttcatcccatcggctcttacacattctacaagtgttcaaaatcatattgcggtttttttctccatgaaaggtgtgctaatcttgctacaaagaaacgacattttcttagcccacagcctctggatcttagcctccaatggataccatacgtcttagggagatgtcgagcttgtcgtcaaatgtttagcgaaggattcatctacaattcatatagggataagtttgacttattgtgcagttcgattaccgtgccttttattcatggaagtcatgatcatcatttactctactacaaactacgatatggtcaagtgaagacttgtcagaactgcggtattgatgaaacagaagtacttggttgtagcaaatgcaattattatttggatttttgttgtgccactctaccaaaaacggtaatgcttcccagatacgatgatcatccactcactctttgttatggtgatgaaaacgcaagcggcaaatattggtgtgatatttgtgaaagggaaacaaatccaaaaacttggttctatacttgtaaagattgcggagtcacgtttcatatattgtgtgtagttggagatatcaggtatgccaaaccaggaggaaagattaacggcgattatgaattgctggctaacaatagctcttcacggccgctttgcagcacgtgtcattgtcgttgcccaggtcccttcattcttaataaggaaagaaacaacatattcttttgttcttattattgtctcgggctcagccgggagcatgcgtactcatcagtggacgtgtgccctccatgggcaatttga

SEQ ID NO: 1168 - protein, 662 aa, Arabidopsis thaliana
MTFRLEGHEHRVSIVSSGDSLECDACDRSSGDGFSCSECKFTVHRKCAFVFMTEDIFHHPSHDGHCLKLLTTGAPVHTDSKCHLCGKNTKHLLYHCYDCKVNLDIDCMIDGICTLARLSKPWHPHLLLMVDFSSDMWCDFCYEGGKHGYFCPRCRLVIHESCVSVFDSPEINHPSHLSHPLKLITNGAPDYTEDRSCHICGKETGNLLYHCDICKFNLDMECAVENPIPVALSDLKVHEHTLTLMPRLISFICDACGTKGDRAPYVCVQCDFRMFHQKCARLPRVIHVNHHDHRVSYKYPLGPGEWRCGVCWEEIDWSYGAYSCSLCPNYAIHSLCATRKDVWDGKELDGVPEEVEDIEPFKRNDDNTITHFAHEHNLSLHNDDEESSLCGACVHPIGSYTFYKCSKSYCGFFLHERCANLATKKRHFLSPQPLDLSLQWIPYVLGRCRACRQMFSEGFIYNSYRDKFDLLCSSITVPFIHGSHDHHLLYYKLRYGQVKTCQNCGIDETEVLGCSKCNYYLDFCCATLPKTVMLPRYDDHPLTLCYGDENASGKYWCDICERETNPKTWFYTCKDCGVTFHILCVVGDIRYAKPGGKINGDYELLANNSSSRPLCSTCHCRCPGPFILNKERNNIFFCSYYCLGLSREHAYSSVDVCPPWAI

SEQ ID NO: 1169 - DNA, 2049 bp, Arabidopsis thaliana
  CDS (1)..(2049)
atggataccgcaaccttcccggtttttaaatttcgcggacatgcgcatgatctattcatcgtcaacactccttttcaccagtgtgctgcttgcgatcgacggactgctgttggctacggtgttggctatatatgcaatgaatgcgacttttctattcaccacatttgtgcatttttgttcaacataccggagatattcgaccatccttctcatgatggacattgtcttaaacttctcacaaccggagctcctcatcacaccgacccaaattgtcatctctgcggtaaatacaccaagagcattctttatcattgctctgactgtaaactcaatctggacattgattgcataagtcaccacatatttgcagcttccaaagaccatctgcttgtgtcatggcaccaccatcctatacaaatatgttatacagatatttgcgaattttgtaatggggttaacgaacttggctgtcactgccttcagtgcgggtttaggattcatctcacatgtgtccccgtatttgactcaccggagatcactcacccttctcatgtcagactccctcttaagcttctcaccgatggagctccaaattacacagacccaagatgtcatatatgtggagaagacactcagcacttactttatcattgtgatatttgtaaattcaacttggatctgcggtgtgcggcaaaaagccctccaccaattgctctttcaaatctaaaggtccatgagcatacactcacactcatgccaagattgatctccttcgtttgtgatgcttgtgggacggaaggtgaccgttctccttacatctgtgttcaatgtgatttcatgattttccatcaaaagtgtgctcaattaccacgtgtcattcatgtcaatcaccatgaccatcgcatttcgtacaagtatcctcttggtcctggagaatggagatgtggagtttgttgggaagagattgattggtcatatggggcttatccatgctctctttgtcctaattatgctattcattcactgtgtgcaacaaggaaagatgtatgggatggaaaagagcttgatgaagtacctgaagaagttgaagatattgagccatttaagaggaatgatgacaacacgatcactcatttcgctcatgaacataacctcatgagcctcggaaaagacggtgaagaaggcagttattgtggagcatgtgctcgtcccatcagttcttacacattctacaagtgttcaagatcagattgcagtttcattctccatgaaacgtgtgctaatttacgcaagaagaaacgacattttctgagcccagaacagctagttatatctcaatggaaaaactatggtaacttccctaaatggtgtgacgcttgtcttctagtttgctctgaaggatttgtgtatggtgtgatgtttgatttagtatgcagttccattgatgtaccttttatccatgaaagtcatcctcatcatttactctaccttaaactacaagacggccactttaagacttgccagagctgtggcatcgatcatactaaagtcgtcataggttgcctcaagtgcaattattttttggattttcattgtgccacactaccgttaacagtcagtcttcccagatacgatgatcatccgctcactctctgttatggtgaaaaggcgagcggcaaatattggtgtgatatttgtgaaagagaaacgaatccagagacttggttctacactggtttagaaagcggggtcactttgcatattttatgtgtacttggggatatcaggtacgccaaaccaggaggaaatatctgtgaggggtttgaattgcaacttaacagtagttctacacgaccaatttgtctcaactgtaaatgtcgttgcccaggtaccttttttattaattttgttggctacggcgaggatcatgatggctacaacgtgttcttctgttctttttattgtttaaaacatgtcatatttcgttatagcaacgactatcatatcatgtgccctccatgggttaagaagttagaactcaagacatga

SEQ ID NO: 1170 - protein, 682 aa, Arabidopsis thaliana
MDTATFPVFKFRGHAHDLFIVNTPFHQCAACDRRTAVGYGVGYICNECDFSIHHICAFLFNIPEIFDHPSHDGHCLKLLTTGAPHHTDPNCHLCGKYTKSILYHCSDCKLNLDIDCISHHIFAASKDHLLVSWHHHPIQICYTDICEFCNGVNELGCHCLQCGFRIHLTCVPVFDSPEITHPSHVRLPLKLLTDGAPNYTDPRCHICGEDTQHLLYHCDICKFNLDLRCAAKSPPPIALSNLKVHEHTLTLMPRLISFVCDACGTEGDRSPYICVQCDFMIFHQKCAQLPRVIHVNHHDHRISYKYPLGPGEWRCGVCWEEIDWSYGAYPCSLCPNYAIHSLCATRKDVWDGKELDEVPEEVEDIEPFKRNDDNTITHFAHEHNLMSLGKDGEEGSYCGACARPISSYTFYKCSRSDCSFILHETCANLRKKKRHFLSPEQLVISQWKNYGNFPKWCDACLLVCSEGFVYGVMFDLVCSSIDVPFIHESHPHHLLYLKLQDGHFKTCQSCGIDHTKVVIGCLKCNYFLDFHCATLPLTVSLPRYDDHPLTLCYGEKASGKYWCDICERETNPETWFYTGLESGVTLHILCVLGDIRYAKPGGNICEGFELQLNSSSTRPICLNCKCRCPGTFFINFVGYGEDHDGYNVFFCSFYCLKHVIFRYSNDYHIMCPPWVKKLELKT

SEQ ID NO: 1171 - DNA, 2079 bp, Arabidopsis thaliana
  CDS (1)..(2079)
atgacttatgagttagaagagttagaaggacacgagcatcttgtttcccgcgttaaacatcatgatggtctggaatgcgatgcttgtgatcgattgaatgttgatggctattcatgcagcgaatgcaagtttaatattcatgtagcatgtacatttgtgttcgataaacaagagatagtcgaccacccttctcatgatggacattctcttaagcttcttacaactggagctcctgatcacacagatccaaaatgtcatctctgcggtaataacaccaagcgccttctttttcattgctctgtttgtcaactcaatttggacattttttgcatagctgatcacctattaggcccagaatatctgaatatgccatggcacccccatcctctactatgttttgattttggatctagaaattggtgcgacttttgtaacgagaattatgaaggacaaggttacctctgctatcgttgcgggttgaggattcatgagaaatgtgtagttgaattacaagagatcactcaacacccttctcatgtcaggcaccctcttaagcttctcaccagtggagctccaaattacacaaacccaagatgtcatatatgtggagaggacactggaaacttactttatcattgtgatatttgtaagttcaatttggatttgcagtgtgcgataaaaagctctccacccgttgctctttcaaatatgaaggtccatgagcatacactcacactcatgccaaaattgatctccttcgtttgtgatgcttgtggaacaaaaggcgatcgttctccttacatatgtgtacaatgtgatttcatgaccttccatcaaaagtgtgctcgtttaccacgtgtcattcatgtcaatcaccatgaccaccgagtttccttcaagtatcctcttggtcctggagattggagatgtggagtttgttgggatgagattgattggtcatacggggcttactcatgttctctttgttctcgttatgctattcattcactatgtgcaacaagagatgacgtgtgggatggggaagagcttgatggagtacctgaagaaattgaagacatcgagccattcaagaggaatgatgacaacacaatcgatcatttctctcatcgacataaccacatgagcctcgacaaaggtggtgaagaaagtagcttctgtaaagcatgtgctcatcccatcggttcttcttcctcactctacaagtgttcagaatgcagtttcattcttcatgaaacatgtgctaatcttccgatgaagaagcgacattttctgagcccacaaccactgactcttagctatcatcgccttcaacgccgttggggagtagaaatttgcgaagcttgtcagcaaattttttgcaaaggattcatctactcgtcgtatttagaagagaactttgacttaccatgcagttcaattactgtgccttttatccatggaagtcatgatcatcatttactctacctcaaactagaaaacggtaacgtgaagacttgccagggttgcggtatcgatgaaaaaagagtcgccataggttgtaccaaatgcaattattttttggatttccgctgtgccactctaccattaacggtaacactttccaggtacgatgatcatccactcactctttgttatggtgacgaaaaagcaagcggcaaatattggtgtgatatttgtgaaagagagaccaatccaaaaacttggttctacacttgtaacgattgcggggtcactttacatgttttgtgtgtagttggagatgttagatacgccaaaccaaaagcaatgatcgagtactatatagaattgctgtcaaacaatagctcttcaagaccattttgccacaactgctattgtcgctgcccaggccccttcattcttaggataagaaagcaacatgacgcccatcttggtggagaatattacatattcttttgttcttattattgttacataatcaccaaaagtaagaaggagtactccaaaattaagttgagatgtcctccttggagaagtggacatcaaagccaattgatggagttgcaaaacgaccagtaa

SEQ ID NO: 1172 - protein, 692 aa, Arabidopsis thaliana
MTYELEELEGHEHLVSRVKHHDGLECDACDRLNVDGYSCSECKFNIHVACTFVFDKQEIVDHPSHDGHSLKLLTTGAPDHTDPKCHLCGNNTKRLLFHCSVCQLNLDIFCIADHLLGPEYLNMPWHPHPLLCFDFGSRNWCDFCNENYEGQGYLCYRCGLRIHEKCVVELQEITQHPSHVRHPLKLLTSGAPNYTNPRCHICGEDTGNLLYHCDICKFNLDLQCAIKSSPPVALSNMKVHEHTLTLMPKLISFVCDACGTKGDRSPYICVQCDFMTFHQKCARLPRVIHVNHHDHRVSFKYPLGPGDWRCGVCWDEIDWSYGAYSCSLCSRYAIHSLCATRDDVWDGEELDGVPEEIEDIEPFKRNDDNTIDHFSHRHNHMSLDKGGEESSFCKACAHPIGSSSSLYKCSECSFILHETCANLPMKKRHFLSPQPLTLSYHRLQRRWGVEICEACQQIFCKGFIYSSYLEENFDLPCSSITVPFIHGSHDHHLLYLKLENGNVKTCQGCGIDEKRVAIGCTKCNYFLDFRCATLPLTVTLSRYDDHPLTLCYGDEKASGKYWCDICERETNPKTWFYTCNDCGVTLHVLCVVGDVRYAKPKAMIEYYIELLSNNSSSRPFCHNCYCRCPGPFILRIRKQHDAHLGGEYYIFFCSYYCYIITKSKKEYSKIKLRCPPWRSGHQSQLMELQNDQ

SEQ ID NO: 1173 - DNA, 1998 bp, Arabidopsis thaliana
  CDS (1)..(1998)
atgagtttgaggttagaaaaacatgagcattatgtagatctcgtcaaacaacgtgatggcttggaatgcgatgtttgcgatcgatcgtatggtgatggcttctattgctctgaatgtaaatttacagttcacaggaaatgcgcggttgtgtttttgttaaaagatatattcgaccatccttctcatgttggacattatcttaagctcctcacaaccggagctcccgaccacaccgacccaaaatgccatctctgtggtaaaaataccaagcgcattctttaccattgctccatttgcaaactcaatttggatattgattgcatctttgattactttagtgatcagcaagcccatctgaatttttcgtggcaccaccatcctctacactttattagttttcgtcttcacttgcagtgcgacgtttgttatatgttccgcagaaaaggttacttttgctttcagtgcaagttggtagttcataaggaatgcgtctcaaaaattgaatcagcagtgatcactcatccttttcatgctagacaccctcttaagctactcacagatggagctccagattacacagatccaaaatgtcatatatgtggagtcgaaactgcaaacttactttatcattgtgatatgtgtatgttcaacctggatattggttgtgcaattcgaaacccggaacgagtttctctttcaaagctaaaggtacatgagcatacactcacactcatgccaaaattgatgttctttgtttgtgatgcttgtgggatgaaaggtgaccatgctccttatgtgtgtgtgcaatgtgattttatgttcttccatcaaaaatgtgcttatttgccacgggtcattaatgtcaatcaccatgagcaccgcgtttcctacaagtatcctcttggtcctggagactggatatgtggagtttgttgggaagagattaattggtcatatggggcttattcttgttcatcttgtcctaactatgctattcattcaagatgtgcaacaaggaaagacgtgtgggatgggaaagagctcgatggagtaccagaacttattgaagatatcaagccatttaagatgaatgatgacaacacaatcactcacttcgctcatggacataacttgagcctcaacaaagacactgaagaaggcagcttttgtgaagcatgtgttcttcccatcgactcttacacatcctacaagtgttcaaaatcagattgttgttttattctccatgaaacttgtgctaattttcctaagaagaaacgtcattttttgagcccagaacctctcacccttcgcccccaaaaccaacgcaagaaagaaagtatttgccgcgcttgcgatcaagttttttgccaaggattcgtctactctacatatcggaaacggaactttgacttgttgtgcagttcaattactatgccttttaaacatcgaagccatgatcatcatttactctacctcaaactagaggttgatcacacgaagacttgccaaaactgcggcattgacgaaaaagaagtcgtcctaggttgtttaaaatgcaactactttttggattttcgttgtgccactctaccatatacagtaaggcttcccaggtacgatgatcatccactcactctttgttatggtgaaaaggcaagcggaaaatattggtgtgatatttgcgaaagagaaacaaattcaaagacttggttctacacttgtaaaggttgcggggtcactttgcatgtcttttgtgtacttggggatattcgatatgctaaaccaggaggaagcatcaacaacaatgttgaattggtgcctaacaatagatcttcaagaccactttgccacaattgtcattgtcattgcccaggtcccttcattcttaaggattttgtcgaagaatgtttttgttcttactattgtttcagccgttgcaaatcctggatgtccatcgtgaagaaggaaaaaggcatatgccctccatgggcattataa

SEQ ID NO: 1174 - protein, 665 aa, Arabidopsis thaliana
MSLRLEKHEHYVDLVKQRDGLECDVCDRSYGDGFYCSECKFTVHRKCAVVFLLKDIFDHPSHVGHYLKLLTTGAPDHTDPKCHLCGKNTKRILYHCSICKLNLDIDCIFDYFSDQQAHLNFSWHHHPLHFISFRLHLQCDVCYMFRRKGYFCFQCKLVVHKECVSKIESAVITHPFHARHPLKLLTDGAPDYTDPKCHICGVETANLLYHCDMCMFNLDIGCAIRNPERVSLSKLKVHEHTLTLMPKLMFFVCDACGMKGDHAPYVCVQCDFMFFHQKCAYLPRVINVNHHEHRVSYKYPLGPGDWICGVCWEEINWSYGAYSCSSCPNYAIHSRCATRKDVWDGKELDGVPELIEDIKPFKMNDDNTITHFAHGHNLSLNKDTEEGSFCEACVLPIDSYTSYKCSKSDCCFILHETCANFPKKKRHFLSPEPLTLRPQNQRKKESICRACDQVFCQGFVYSTYRKRNFDLLCSSITMPFKHRSHDHHLLYLKLEVDHTKTCQNCGIDEKEVVLGCLKCNYFLDFRCATLPYTVRLPRYDDHPLTLCYGEKASGKYWCDICERETNSKTWFYTCKGCGVTLHVFCVLGDIRYAKPGGSINNNVELVPNNRSSRPLCHNCHCHCPGPFILKDFVEECFCSYYCFSRCKSWMSIVKKEKGICPPWAL

SEQ ID NO: 1175 - DNA, 1986 bp, Arabidopsis thaliana
  CDS (1)..(1986)
atggacgatttgaaggttaacctaccgttccacgagcatccattaacgcctgtgaaaatggagtcgaagtgtgattggtgtggaatcaaattcatacacatatctgatggctaccaatgtgattcctgtttcactcctttattccacaagacatgcgccaacgataagaatatcgcccacccttctcaagcgtgtggcatcattctttatcatacagtgaattttgatagcggcaagtggagatgtgcaaaatgtggagaaaagatctacgattccttattttttgtatgtaacgactgtgttttaaaacctagaagaaaaggaagcagatttggtggttcttcatatttccatttcaactgtgctaaatacccaccttcggaggttattgatgttcctcagcaccatgaccataaactcaagctagagatggtgataagcagcttcacttgtgctgcttgtggaaaagatggtgacggatattcgtacaaatgtcaggaatgtaatttgacgtttcatgtgaattgcgaaaagtatccggcagaggtaacccatttttcccacttcttacaccctctaaaactcttcaagggggaaccacctgcttacactgatggaaaatgtcgtttgtgtggagaaaaacttgctaattttgaagtcttttatcattgctccgcttgtaactttagcttagatctccaatgtgtttttcatccaccaaaacaaaatcctcacgacctaaacatccatgaccatccactcactcttatgccaaaatccatctcttttacctgtaccacttgcgggctaaatggagatcggagcccatacgtatgtcttccttgcgattttacaagccacaatgattgctctggatatccatgggtcataaacatcaaccgccatgatcatcgtgtttctcgcacttcccttattggtgtggtgaattcagtatgtggaatttgtcgcaagaaaatggattggagttgtgggggttattcttgtcagaagtgttcgagctatgtgtttcataccaaatgcgctactagagaagatgtttgggacggcaaagaaatgaaagacgaacctgaagaagaggaagctattcaaccattcacgataatcgatgaaaacacaataaaacatgtcagccataaagagcataacctaagacttgacaagtctggtatttttattgaggagaggatttgtgaggcatgtgtttatcctatctatcaccactccttctatagctgcatgagttgtagtttcattcttcacgagagttgcgcctatctgcctctatggaaacgacatgtggtaagcaacgaacgacatgagtataaatattgggactattttattagatgttcggcttgtagattgctttccaatggttttagatacgaaacaacgcaaacttcattggatttgcgatgtgcttcaactactgagccatttttccataaaactcatcctcatcccttattttacacatcgccacaaggaatctgcagtatttgcaagaaagatcatcttcatgtgctcagatgcgttgaagatggttgtgaatacatcatggactataagtgcgctctattaccatatgaggtaaagcatagtgtcgaccaacattttctctctttgtgctatggtgaagaaaatgcaagtggtaaacattggtgtgatatttgtgagaaagaaatggatccaaaaacatggttttacacctctaaggattgtgagcttactttgcatacagactgtgtgctcggcgattttcgaggtctcaagccagaaagcgaagaatcgatgtacatcgacgacttcgaaatgtatgttaaggtggttcgcaacaacagtatgtctcgaccactttgcaaacaatgcaagtctcgttgcatatttccagtcatcttggaaacatggaatgaaagctgcctccgtaatgaatattattgctctgaagcttgtttctattcctaa

SEQ ID NO: 1176 - protein, 661 aa, Arabidopsis thaliana
MDDLKVNLPFHEHPLTPVKMESKCDWCGIKFIHISDGYQCDSCFTPLFHKTCANDKNIAHPSQACGIILYHTVNFDSGKWRCAKCGEKIYDSLFFVCNDCVLKPRRKGSRFGGSSYFHFNCAKYPPSEVIDVPQHHDHKLKLEMVISSFTCAACGKDGDGYSYKCQECNLTFHVNCEKYPAEVTHFSHFLHPLKLFKGEPPAYTDGKCRLCGEKLANFEVFYHCSACNFSLDLQCVFHPPKQNPHDLNIHDHPLTLMPKSISFTCTTCGLNGDRSPYVCLPCDFTSHNDCSGYPWVININRHDHRVSRTSLIGVVNSVCGICRKKMDWSCGGYSCQKCSSYVFHTKCATREDVWDGKEMKDEPEEEEAIQPFTIIDENTIKHVSHKEHNLRLDKSGIFIEERICEACVYPIYHHSFYSCMSCSFILHESCAYLPLWKRHVVSNERHEYKYWDYFIRCSACRLLSNGFRYETTQTSLDLRCASTTEPFFHKTHPHPLFYTSPQGICSICKKDHLHVLRCVEDGCEYIMDYKCALLPYEVKHSVDQHFLSLCYGEENASGKHWCDICEKEMDPKTWFYTSKDCELTLHTDCVLGDFRGLKPESEESMYIDDFEMYVKVVRNNSMSRPLCKQCKSRCIFPVILETWNESCLRNEYYCSEACFYS

SEQ ID NO: 1177 - DNA, 2079 bp, Arabidopsis thaliana
  CDS (1)..(2079)
atgagtttcaagataaaaggacacccgcatcgtgtatccctcgttaagaatcatgatggtttggaatgtgatgcttgcgatcaatcctatggtgatgcctactcatgcggtgaatgcaagtttactgttcataagaaatgtacgtttttgttcgaagtcgtgccagagatattcgaacatccttctcatgttggtcattgtcttaaacttctcacaactggagctccagatcataccgtacccaaatgtcatctttgcggtaaaaacaccaagcgtcttctttatcattgcagagattgtaaactcaatgtggatatcgattgcattattgatcccatgtgtgcccaagccgatctgaatatgccgtggcaccaccaccctctattcatgggtaattttgcgactaatatgacttgcgatgtttgttatgacaaccacgtagatggctatatctgtctttgctgtcggttgttcgttgggtgggtatgcgctgccctagtaattgactcaccagagatcactcatccttgtcacaccaaacaccctctcaagcttctcaccgaaggagcacccacttacactgatccaaaatgtcatctatgcggagaagacactggaaaattcatctatcattgtgatatctgtaagttcaatttggatttggtatgcgcaaaaacaaaaaccccaccagttgctctttcaaatctcaaggtacatgagcatacactcaatcttatgccaagattgatctccttcgtttgtgatgcttgtgggacaaaaggtgatcgggctccttatgtgtgtcatcaatgtgatttcatggttcacaaaaagtgtgctcatttaccacgtgttattaacgtcaatcaccatgaccaccgcgtttcgttcaagtatcctcttggtcttggagaatggcgatgtggagtttgttttgaagagattgattggtcatgtggtgcttattcttgttctctttgtcctcaatatgctattcattcactatgtgcaacaaggaaagacgtatggaatgggaaagagctcgatggagtacctgaagaagttgaagatatcgagccattcaagaggaatgatgacaacacaatcactcatttcgctcatgagcataacctcatgagcctcagcaaagacggagaagaaagtagcttgtgtggagcatgtgttcttcccattggttcttacacattctacaagtgttcaaaatcaaattgcagcttcattctccatgaaaagtgtgctaatatttctaagaagaaacgacattttctgagctcagaacctctcattctttgcttcgaaagcattatcgacgatgactttttatgcagagcttgttatcaaatgttttgtgaaggattcttctactcttctaaaggtgtgaactttgacttaatatgcagttcgattacaatgccttttatccatggaagtcacgatcatcacttactctacgtaaaacaagaagaaggtaacaagaaaacttgccacaactgcgacaacgaacgtgctaaagtcctcctaggttgtatcaaatgcaattactttttggatttccgttgtgctactatgccattaacaataatgcttccaaggtacgatgatcatccactcactctttgctatggtgaagaaaaggcaagcggcaaatattggtgtgatatttgcgaaagagaaacaaatccagagacttggttctacacttgtaacgattgcggtgtcacattgcatacattttgtgtacttggagatatcagaaatgccaaagcaggaggaagtttcagacaccatggtgaacttgaattgctacctaacaatagatctacacgaccactttgcaacagttgtcatagtcgttgcccaggttcattcattatgaagagttatgacggcggggaagtttattgttcttgttattgtgtctcatctcagcttgggtatacatacaagggtgctgatacatgccctccatgggcaatatatgagcttgaattgattgttgttattcacgtcaattatttgtctacctatattctacattatttgacagctataaaatga

SEQ ID NO: 1178 - protein, 692 aa, Arabidopsis thaliana
MSFKIKGHPHRVSLVKNHDGLECDACDQSYGDAYSCGECKFTVHKKCTFLFEVVPEIFEHPSHVGHCLKLLTTGAPDHTVPKCHLCGKNTKRLLYHCRDCKLNVDIDCIIDPMCAQADLNMPWHHHPLFMGNFATNMTCDVCYDNHVDGYICLCCRLFVGWVCAALVIDSPEITHPCHTKHPLKLLTEGAPTYTDPKCHLCGEDTGKFIYHCDICKFNLDLVCAKTKTPPVALSNLKVHEHTLNLMPRLISFVCDACGTKGDRAPYVCHQCDFMVHKKCAHLPRVINVNHHDHRVSFKYPLGLGEWRCGVCFEEIDWSCGAYSCSLCPQYAIHSLCATRKDVWNGKELDGVPEEVEDIEPFKRNDDNTITHFAHEHNLMSLSKDGEESSLCGACVLPIGSYTFYKCSKSNCSFILHEKCANISKKKRHFLSSEPLILCFESIIDDDFLCRACYQMFCEGFFYSSKGVNFDLICSSITMPFIHGSHDHHLLYVKQEEGNKKTCHNCDNERAKVLLGCIKCNYFLDFRCATMPLTIMLPRYDDHPLTLCYGEEKASGKYWCDICERETNPETWFYTCNDCGVTLHTFCVLGDIRNAKAGGSFRHHGELELLPNNRSTRPLCNSCHSRCPGSFIMKSYDGGEVYCSCYCVSSQLGYTYKGADTCPPWAIYELELIVVIHVNYLSTYILHYLTAIK

SEQ ID NO: 1179 - DNA, 1776 bp, Arabidopsis thaliana
  CDS (1)..(1776)
atggctatattatcgataaaactacctattcacatacatcctttgtccctttcctttcgatttcatgatcggtgtgaaggctgcagttttcgaaaccaaggtgaatactatggaggctatcgatgtaatgattctgactgcaatcgtgttctgtttcacaaggaatgcgccgagtcaccacttgaaatcaaccacccttctcacccggaacatcctctccggcttacagagaggcctccaagatatgaatgtgatatatgcggcattcatcacttagctgatgtgccgtatttttatcattgttccatatgtgacttcaacgtcgacacatcatgtgcgcggaaaccaccaccgccacctactcatgattttcaagacctaccatttgtctttccaaagataagtggaatatacaattgttgtggagtatgtgggcactcagttgttgctggtaaatattattattcactaccttctcgggatcagtatgctcatttggagtgtatatatcatgagaaaaaagtaaaccttccttttcaccctaatcaccctcttgagctcaccatatctaaatccctccctgatgatgccgaaaaagcatgtgttttgtgtggagtgagatcggaaattgtgatgtattactgcttaatatgtgacttcagcatgtgcctaaactgtgtgagaagccctccacctcttacggccaagtctcttatttatgtcttcaatgtgatgttatggtccatcgaagttgtattggcttaccgcattgaatcagtttcatggggcttcatttgccccaaatatgttgttcattcgcaatgtgcaacaagttacaacgtttgggatgggatagaacttgaagggataccagaagaagctgaagatcttccgtttaaggtggttggtgataacctgataaatcatttcagccacgagaaacataatctaaggcttaccaatgaagacattatttatgatgaaagtagccgatgtgaagcatgcatctttcctcgcaactctggttcgatatattgttgcgatcaatgtacttttttccttcatgaaaaatgtgcacatctgcctatgaagagacgccacttaatatacaacagaccatttaccctacatgctagaggaaaagatctccaaatagattggttctcatgtgacgcttgtggaaaacaatcgactggtttcaggtacatctctgatgatttaatgcttgatgtacattgcagttccgtttccgaaccgttcgtccatgatggccatgtacatcccttatattacaaagaagaagccagtaccaagtgtgattcatgtcataagctgtcttataacatgcttggttgtgatgtttgtgactttagtttggatttttgttgtgcaaatttgccaaagacacttaagcacaaatacgatagacatcctctctccctatgttatggtgaaaaggcaagtggtaaatattgttgtgatatttgcgagacggaaatggatccaagtaagtggttctacacatgcgatgattgtgtggtcacattccatattgactgtgtttttggggatttctcacgcttcatcgcaggatccatattcgagactataatatacacatttgaagtggttcctaccaaagatactacacgacagctatgctcccagtgtcactctcgatgcaaaacacctttcattctaaaggctcttagccaaactgaagattattgtatttgttctttcaagtgtcttagttcatatttttctaagttatga

SEQ ID NO: 1180 - protein, 591 aa, Arabidopsis thaliana
MAILSIKLPIHIHPLSLSFRFHDRCEGCSFRNQGEYYGGYRCNDSDCNRVLFHKECAESPLEINHPSHPEHPLRLTERPPRYECDICGIHHLADVPYFYHCSICDFNVDTSCARKPPPPPTHDFQDLPFVFPKISGIYNCCGVCGHSVVAGKYYYSLPSRDQYAHLECIYHEKKVNLPFHPNHPLELTISKSLPDDAEKACVLCGVRSEIVMYYCLICDFSMCLNCVRSPPPLTAKSLIYVFNVMLWSIEVVLAYRIESVSWGFICPKYVVHSQCATSYNVWDGIELEGIPEEAEDLPFKVVGDNLINHFSHEKHNLRLTNEDIIYDESSRCEACIFPRNSGSIYCCDQCTFFLHEKCAHLPMKRRHLIYNRPFTLHARGKDLQIDWFSCDACGKQSTGFRYISDDLMLDVHCSSVSEPFVHDGHVHPLYYKEEASTKCDSCHKLSYNMLGCDVCDFSLDFCCANLPKTLKHKYDRHPLSLCYGEKASGKYCCDICETEMDPSKWFYTCDDCVVTFHIDCVFGDFSRFIAGSIFETIIYTFEVVPTKDTTRQLCSQCHSRCKTPFILKALSQTEDYCICSFKCLSSYFSKL

SEQ ID NO: 1181 - DNA, 2049 bp, Arabidopsis thaliana
  CDS (1)..(2049)
atggaaaaggtagagttaccagttcacgagcatcctttgttcatctttgatcggatttgtatggacacttgtaaaggatgcagtgtttttggttatttttacggtggctatgtttgcaatgaggtaggttgtgataccctcttccataaggagtgcgtcgagtcggtaccagagatcaaacacccttcccatcctcaacatcctctcaagctcaacctgaaatgtggacggttttgttgtagtttgtgtataagtggattgcaagttggttatcattgttcaatatgcgacttcaatgtgcatttggtttgtgcaagaagacctccatcctcaacttcatcctcatcctcatcttcgccgctacctactagtgttgataattccaaagtgcatcagcatccacttctactctctaagaacgtggagacgttcttactaaaggaagggcgcaattgcaacatgtgcaacacgaatatcaaaatcaatgaaaaacaactttgtgaatgtcgtctgtgcaatatccttttccatttggattgtgtcgggctcattccaaacgtataccaaacttctcatccgaaacaccctctcaagtttctccaatacggagcaccagagtatgctcacgagaaatgccttctttgcaagaagaagttcaaaaagttatctaacaactatgatcgagtttaccactgcgatgtttgtaatgtcaccatttgcaaggattactgtatggcgaaaccaccgccagtttctgttgtgagtcctacgacccatgagcatcaactccaccttgttccaagactagtcaattttacttgcaacgcttgtgggacggctggtgatcgaagtccttatttttgtcttcaatgcaatttcatgatccatcgagcttgtattgatttaccccgcgtgataaatatcaatcgtcataatcatcgcatctcttacactagtcttcttggacacgggaattggacatgtggagtttgtcgtaagaaagtagatgggttttatggggcttattcttgctcgaaatgtcctagctatgctgttcatgcaagatgcgcgacgagaaaggatgtatggtacaaagttgaactagaaggaacaccggaagaggaggaaattgcgccattcgaggtggtcgatgagaatctgatcaagcacttcatccatggccataatttaagactcaacaaggatggtaaccacgaaagcaaattttgtgaagcatgtgcctccaaaatcaataacgatccgttttatggttgtgagcaatgcgactttattctacatgaaacatgtgctagtctgcctagaaagataaggcatgtatccaacaataaacctttaattctatcgacagatacatatttgaaagattctccacgccaaagaagacattgttctgcttgtttccagaatttcagcggttttaggtacgaaactcagtctcgtaatttgtttggttccgctactctagatgttcgttgtagttcgatatatgaaccatttctccatgaaagccatccacatcctttatacttcagtcttgagggggatacaaaatgttctgcatgtgacatcacatatagcgccagggatatgttgtgttgtgatgagtgtgaatttcggttggacttccgctgcgctactttacctagaaaggtaatgaatcagaggtacgacgatcatcctctctacttgtcttacggtgaaaataaggaagatggtcaactttggtgtgaggtatgtgaaacaaaagtagatccaaaggaatggttgtatacatgtaatctatgtggaatcattttgcacatatcgtgtgtcgtgggagacttctcatatcacgtaccaggacacatttcatcgaacaaaatcgcaaatggagtagtggtacccaacacttctatttgtagaccccattgttctaggtgttcttcaagatgcaagcttccttatatacttcaaatcaacgacttttacttttgttctaataagtgttgtgggaatactcgcaaccctaggggtcgtaattactactaa

SEQ ID NO: 1182 - protein, 682 aa, Arabidopsis thaliana
MEKVELPVHEHPLFIFDRICMDTCKGCSVFGYFYGGYVCNEVGCDTLFHKECVESVPEIKHPSHPQHPLKLNLKCGRFCCSLCISGLQVGYHCSICDFNVHLVCARRPPSSTSSSSSSSPLPTSVDNSKVHQHPLLLSKNVETFLLKEGRNCNMCNTNIKINEKQLCECRLCNILFHLDCVGLIPNVYQTSHPKHPLKFLQYGAPEYAHEKCLLCKKKFKKLSNNYDRVYHCDVCNVTICKDYCMAKPPPVSVVSPTTHEHQLHLVPRLVNFTCNACGTAGDRSPYFCLQCNFMIHRACIDLPRVININRHNHRISYTSLLGHGNWTCGVCRKKVDGFYGAYSCSKCPSYAVHARCATRKDVWYKVELEGTPEEEEIAPFEVVDENLIKHFIHGHNLRLNKDGNHESKFCEACASKINNDPFYGCEQCDFILHETCASLPRKIRHVSNNKPLILSTDTYLKDSPRQRRHCSACFQNFSGFRYETQSRNLFGSATLDVRCSSIYEPFLHESHPHPLYFSLEGDTKCSACDITYSARDMLCCDECEFRLDFRCATLPRKVMNQRYDDHPLYLSYGENKEDGQLWCEVCETKVDPKEWLYTCNLCGIILHISCVVGDFSYHVPGHISSNKIANGVVVPNTSICRPHCSRCSSRCKLPYILQINDFYFCSNKCCGNTRNPRGRNYY

SEQ ID NO: 1183 - DNA, 2061 bp, Arabidopsis thaliana
  CDS (1)..(2061)
atggaaaaagtggtgctacgggttcatgaccatcctttgttaccctttgaacgcttttattttggccgttgttccgggtgctcacgtgaaggctacttttatggaggctaccgttgcaatgagttggcgtgttttgcggtgttccataaggagtgcgctgagtccaaacccgagatcagccaccatgcccatcccaagcatctgcttaagcttggcaatagacgtcaacgttgtcatttgtgtgaacggccggtgggaattggttatttttgttcgatatgtgactttggtatgcatttggtttgtgcgaagtccccaccactctcacttcagccacaactctctagtattgagaattacaaggtgcatgaacatcctcttaaacctttcaaaacagcatggcttgcagaaactggcaattgcaaagggtgtaactacattatcggcaatggagatagcgctcctttttatgaatgtcgtcggtgtaaactttacattcatgtgacttgccttgagctctttttcaccacagatgcacgccacaactctcatctcaaacaccctctcaaatatctcaaaaatggacccccgagctacgccgaccataaatgccttctttgcggaagagagtttgaagatcaacaaggccaaaaatatgagctttatcactgtgatgtttgtaacttcagcatatgcatttcttgtcagggaaacccaccaccactagttgttgttactccgaagacccacgagcatcaacttcacctcattccaagacttcttgattttacttgcaatgcttgtgggacacaaggtgaccgaagcccttatttttgtcttcaatgcaatttcatgattcatcgaggttgtatcgacttaccccgcatcataaacatcaaccgccatgatcatcgcatctcttacatttgtcatctcggacaagggaatttgaaatgcggagtttgccgcaaaacagtggatgggttctacggggcttattcctgctcgaaatgttctagttacgttgttcattcattatgtgcaactagaaaagatgtatgggacatggtagaactagaaggaacaccggaagaagaagaaattgcgccattcgaggtggttgatgagaacacaataaagcacatgagtcatgatcatgatttaatattcaacaatgatggtataaatctccatgaaagcaagctttgtgaagcatgcgtctcccagatcaatactgatccgttctatagttgtgagctatgcggttttattttacatcaaacatgtgctaatatgcctaggaagaaaaggcatgttttgtgcaacatacccttctctctacaaacagacgatagcaaggattcttcacgcctaagaagaaaatgtagtctttgtctccaacatttcactggatttgcgtataatctgcatattgcgtataactcgcgtaccgaagttatggatatacgatgtggttcgatatttgaaccatttgttcatgaaaggcatccacatcctttatactacaagttcttcaccttttcggcggttgcgaagtgcgacatctgtcacataacaagaaggcatttgttatgttgtgaagagtgtgactttaggttggatttcaggtgcgcaactttaccaaaaaaagtaatgaagcaaaggtacgatgaccatccacttttcttgtcttatggtgaaaataatgtggatggtgaatactggtgtgacgtatgtgaaaaaagggtagatgcaaagacatggttctatacatgtgatgcttgtggggtcactttacatgtttcttgcgttgtgggtgacttctcctatcatatgccaggaccattatcaaccgtagttagcgaatacaaaatggtaccgcccgcggtagtaagcttatacaaagtggtgccaaacacttcgatttgtagaccactttgctccaggtgtcacactagatgcaaactcccttgcattcttgaaacctccgaggatggtgttaatgtttacttttgttctaatgattgtcataaaaatccttgggagtcgtcgtattattag

SEQ ID NO: 1184 - protein, 686 aa, Arabidopsis thaliana
MEKVVLRVHDHPLLPFERFYFGRCSGCSREGYFYGGYRCNELACFAVFHKECAESKPEISHHAHPKHLLKLGNRRQRCHLCERPVGIGYFCSICDFGMHLVCAKSPPLSLQPQLSSIENYKVHEHPLKPFKTAWLAETGNCKGCNYIIGNGDSAPFYECRRCKLYIHVTCLELFFTTDARHNSHLKHPLKYLKNGPPSYADHKCLLCGREFEDQQGQKYELYHCDVCNFSICISCQGNPPPLVVVTPKTHEHQLHLIPRLLDFTCNACGTQGDRSPYFCLQCNFMIHRGCIDLPRIININRHDHRISYICHLGQGNLKCGVCRKTVDGFYGAYSCSKCSSYVVHSLCATRKDVWDMVELEGTPEEEEIAPFEVVDENTIKHMSHDHDLIFNNDGINLHESKLCEACVSQINTDPFYSCELCGFILHQTCANMPRKKRHVLCNIPFSLQTDDSKDSSRLRRKCSLCLQHFTGFAYNLHIAYNSRTEVMDIRCGSIFEPFVHERHPHPLYYKFFTFSAVAKCDICHITRRHLLCCEECDFRLDFRCATLPKKVMKQRYDDHPLFLSYGENNVDGEYWCDVCEKRVDAKTWFYTCDACGVTLHVSCVVGDFSYHMPGPLSTVVSEYKMVPPAVVSLYKVVPNTSICRPLCSRCHTRCKLPCILETSEDGVNVYFCSNDCHKNPWESSYY

SEQ ID NO: 1185 - DNA, 2310 bp, Arabidopsis thaliana
  CDS (1)..(2310)
atggatccggatccggattcggagtcggagctcttatcactccttactcaactaatgtttgtcgagtactttaacttgtactgggatgccactccattgcttaccgaactaatccttctagtcagctcaatggatttggattcgcagccgaagccggagtcagagttcatgtcactcactactcaagcaatatctctcttcaactctatggatttggagtctcagtccaaactgctgtcggatctcatgtcaatggtttttcaaaatttatctctctttaactctgctttggactcggaagccacaacactctttggtaaaataatctctctggtcagctcaatggatttgactacagaggagaagccagagtctgatgagctagtgttactcatccaagagatactctctctagtcaactctagggattcagattcccagccaaagcggctggtggagctaatatcattcatttctcaaaagatttctctcattgatgaaactttggaagtcaaaccggagccggaacttatctcactcactcatcaaatactctccctcgtcgtctctatgaactcaaactcgggggagtatatttccttgtgccctcaagcacaagtaaaactggaaaacggaagatttcgtgttcttgaagacgtctcgtggcgcaccaataacaagtggcattgcctttctgtaaactggcggacattcaagttatcaagagaagaagacactctccattttatctgcataggttgcaatggcgataaccataaagaatttaacaatgttcctgttgagatcaaccatcctcttcatccaaatcattctctccagcttgtcgtgttgcaggaagatagtaccagggaatgctattgttgtgatgaagctcttagccgtatactttattattgctcggcttgcgattttgctataagtatactttgtgcgaggaaaccaccagtctttttgataaaccatcaccgtccggagtggcatggtcatcctcttgctctgtttccaagacaagctttcttaacttgcaacctttgcgccttggccgatccaagctctcctatctatatgtgtccgccttgtgactttgtgactcatctaagatgtatcaacttaccacgtgtcataaagatatctcgccatagccatcgtatctattttacttcttcgtttgagaaagaaggtttgtcttgtggtgtttgtcgcagaaagatcaacaaattatacggaggctattcttgtatcaaaaatggttgttggtatgcggcacattcaagatgtgcaacacaaaaaaatgtgtgggatggtgtagaacttgagggagtgccagaagaaaatgaggaagaagtagatccaccgtttgcaacgaaaggaagtggagtcatacgacatttcactcatcgtcatcttttgagacttgatgtggacacgggaagagattacgacgaggataagctgtgtaacatatgcattacgccaatctattttggtaacttctactcgtgtacgcctagctgtgattataatctccacgaaacatgcgcaaattttcctcgtaaaatagatcatccgatacatccacatcagcttaatttagaggcaggatacggtgatggggagatcaatgagtatgaatgctcggtgtgtcctaggaagcgtactgtcggtttcctctatcggtgcagaaaatgtttttatctacacgtgcagtgtgccatagcttccgagccactagatcatccaagtcatatacatcctttatacctcacatccaaaccagacgaagagcaaagaaaatgttcggtttgcaagaagtcagggcattgtcccaccaaggaaacgttcaattgcatcgaggagtgcgactttgctttgtgttttgagtgtgctactttagctcaaaaggtgaggtataagcatgataagcatgtgctcactctttcttatggggacaagacaagtaccatgacttattggtgtgaaatttgtgaggaaagattaaatccaaaggagcggttttatagttgtgatgagtattgttgtgtcaccatacacattgaatgcttggttggggtggacttctacatgaagcccggttcaaaatggttcaacaagtacggtgcagaggtaagtgttctgccaaacaatcatcatatgtctcgacctttttgctttatttgcaagaagcgttgtccacacaaaacatttttccagtgcaatggttttgaatattgttccagatcatgtttacttactaaaagtaaagaggtgatctaccttggtggccattag

SEQ ID NO: 1186 - protein, 769 aa, Arabidopsis thaliana
MDPDPDSESELLSLLTQLMFVEYFNLYWDATPLLTELILLVSSMDLDSQPKPESEFMSLTTQAISLFNSMDLESQSKLLSDLMSMVFQNLSLFNSALDSEATTLFGKIISLVSSMDLTTEEKPESDELVLLIQEILSLVNSRDSDSQPKRLVELISFISQKISLIDETLEVKPEPELISLTHQILSLVVSMNSNSGEYISLCPQAQVKLENGRFRVLEDVSWRTNNKWHCLSVNWRTFKLSREEDTLHFICIGCNGDNHKEFNNVPVEINHPLHPNHSLQLVVLQEDSTRECYCCDEALSRILYYCSACDFAISILCARKPPVFLINHHRPEWHGHPLALFPRQAFLTCNLCALADPSSPIYMCPPCDFVTHLRCINLPRVIKISRHSHRIYFTSSFEKEGLSCGVCRRKINKLYGGYSCIKNGCWYAAHSRCATQKNVWDGVELEGVPEENEEEVDPPFATKGSGVIRHFTHRHLLRLDVDTGRDYDEDKLCNICITPIYFGNFYSCTPSCDYNLHETCANFPRKIDHPIHPHQLNLEAGYGDGEINEYECSVCPRKRTVGFLYRCRKCFYLHVQCAIASEPLDHPSHIHPLYLTSKPDEEQRKCSVCKKSGHCPTKETFNCIEECDFALCFECATLAQKVRYKHDKHVLTLSYGDKTSTMTYWCEICEERLNPKERFYSCDEYCCVTIHIECLVGVDFYMKPGSKWFNKYGAEVSVLPNNHHMSRPFCFICKKRCPHKTFFQCNGFEYCSRSCLLTKSKEVIYLGGH

SEQ ID NO: 1187 - DNA, 1809 bp, Arabidopsis thaliana
  CDS (1)..(1809)
atgggtgatgaagaagggccgagatgcattgtttctgatccagctcacccgcacaacgtctctcgtcgagacaattacaaggttaagcacaactgcttctcttgcgggaaaaacgatgtttcttgggagttacgtggatttactgacaacttccattactactgcaccatatgcgacatagagttccacaggagatgtcttcagattccaagtaagatgattcacccttatcatcctcaacaccctctcactttcacctttgtaagctatgaaaccaagatcgtagtggacgtcaactacggtgacttctgtacctttctatgtcgttctggattgaacatgcctgaatacctccaaactattgggtccaaatcaaatatcatattcgataaatgcactttgtgtgggaatgttctcagcgaatggttctaccgttgttccatatgtaacttctttttggatttccgttgtgctagaaattttccgcctcttacaattcaaaatccaagaagccatcaccattcactcgccttgttccgtcgaccagtctcatttccttgtgatgcttgtgggttgatcaacttgttagacccaagttatgcttgtcaccaatgtgattacatggttcacaagagttgtgttgatttaccacgcgtcataaagatcacacgtcaccctcatcgactttcgcacactcctcacctaccaaccaaagtttcgttatgccgggtttgctacaagcatgttgacatcaagtatggtcaatattcttgcacacatgagggttgcacttatgtagtccattcaaaatgtgcaacacatagaaaaatatggaacgggggagaactcgaatgggcacctgaagaacccgatgaaactgaagctattgcgccattcaaaaaagtaggtgatggtttgatacaacatttttgtcaccatcttcatattctaaagcttgagaaatacgaccgtgtacgtgactcagcaaagcaatgtcaagcatgcatgcgtcctatcagctctcaagatttctacaactgtatggaatgtgacttctttctccatgaagtatgtgccaatcttccacggaaactagagcatgcattgcatcaccaccctcttttcatagacccgtatcctctatacgatcacgattgcggtaacttagcgtgttcagtttgtttccggaagtcgagtggtctcatgtacagatgcagagaagaagaatgcgtaggttacgagcagtttcagctagatctcaactgcgttttagttcctgagtatttcacccataaaagtcatgcagaacatcatgtattcatctccccatcctatagcgaagaaaacgaagctctctgccagggttgcaagaagagagtttataattatcatctacactgtagtttgtgcgaattcgttttatgttacgaatgcgccacaattcctaatgagatacactacaaattcgatgagcattctctcactctttcttatggagaaagtggcgtggatgacaagtactggtgcgaagtatgcgagaaaggattagatccaacggaatggttctacataaacaaagaaagttgcaccacaatccaccataaatgtttatttggagattctggttatatgaagcctggtcacatattcgattactgcggtaataaggtggaagttgttggcaatggtagtagctctcgtcccatatgtcttacatgtcaataccattgcccacatcacaagaagcacgagaaaactcatttgccatcgattggtagagcatttgatggtgtgaagttacttagctga

SEQ ID NO: 1188 - protein, 602 aa, Arabidopsis thaliana
MGDEEGPRCIVSDPAHPHNVSRRDNYKVKHNCFSCGKNDVSWELRGFTDNFHYYCTICDIEFHRRCLQIPSKMIHPYHPQHPLTFTFVSYETKIVVDVNYGDFCTFLCRSGLNMPEYLQTIGSKSNIIFDKCTLCGNVLSEWFYRCSICNFFLDFRCARNFPPLTIQNPRSHHHSLALFRRPVSFPCDACGLINLLDPSYACHQCDYMVHKSCVDLPRVIKITRHPHRLSHTPHLPTKVSLCRVCYKHVDIKYGQYSCTHEGCTYVVHSKCATHRKIWNGGELEWAPEEPDETEAIAPFKKVGDGLIQHFCHHLHILKLEKYDRVRDSAKQCQACMRPISSQDFYNCMECDFFLHEVCANLPRKLEHALHHHPLFIDPYPLYDHDCGNLACSVCFRKSSGLMYRCREEECVGYEQFQLDLNCVLVPEYFTHKSHAEHHVFISPSYSEENEALCQGCKKRVYNYHLHCSLCEFVLCYECATIPNEIHYKFDEHSLTLSYGESGVDDKYWCEVCEKGLDPTEWFYINKESCTTIHHKCLFGDSGYMKPGHIFDYCGNKVEVVGNGSSSRPICLTCQYHCPHHKKHEKTHLPSIGRAFDGVKLLS

SEQ ID NO: 1189 - DNA, 1959 bp, Arabidopsis thaliana
  CDS (1)..(1959)
atggctacaacagcagtaaacctaccaattcatgagcaccctctttatccttcagctcgatgtattataggtgaatgtgatggctgccatgtaaatggttacatgtacaacggctacttttgcaatgaacctttctgctttatttggttccataaagagtgtgctgaggccccagcggagatcagccatagttcccaccatcaacatcctctcctgctcaccaatgactcgattgatggtccttgtgatctgtgtggacagaagctattgcctccttgttacagttgttccacatgtgagttcaaggtggatttgacttgtgcgatgaaaccatcaccgcctgctatcgaacatccgctgtgtcatcaccattcacttgtcttcttgaagaaacgagaggagaaggtgtcatgtgaattgtgcaaggattctattgccggaccatcctattcgtgtcttgaatgcgatgtgtacttccacgtgaattgcatccagctctccaaagaggtaaatcatccttgtcattctgctcatcctctcaagttaatcccatttgagtcacttacggatgatgccgagacaacttgtcttttatgtggaaagaagccagctgaaaatatgctttatcattgttcggtttgcaatttcacatcgtgtcttggttgtaccaaaaacccaccactcctcgttattgagcatatcaagacccacaaacacccacttattctctttcctagaagaatcccgtgtatctgtgacatttgtgggaagaaatgcgagtttgcggtgtatgtatgtcctcagtgtgattttgttactgcaagagggtgtatcgacttagctcgtgtcatcaatatcaatcgccatgatcatcgcatttatttaactcatcatctcggtactgggtattcgaaatgcggagtttgtcacgaaaatgtaaatcagtacaagggggcttattcttgctctgtttgccctcactatgctgtccattctacatgtgccgtgagaactgacgtatgggacggggtagaattggaagggaccactgagatcacagaagacaattcaccattcaaggtggtgggtgataacttgatatgccattttagtcatgaagagcatcctttaaggttccagaaggacgacgtcttcattcatgatgagcacaaacgatgtgcagcatgtatccatcctcttggatttggctccatctactgctgtgaaacgtgtccattcattctccatgaaaaatgtgctaatcttcctatgaagaaaagacttgtcttcggcaccagaccatacacattaatgaaagaaactacccaacttacagactgcacgttgtgtggaatattttctgatggtttcgcgtacagctcccgctggttggatgtagatgtgcattgtggttccctaaatgagccgctcgttcatgatggccatatacatcccttaaattttgataaaatggagggtcacttttgcgatggatgcaaaaagaatatagatgattatatgcttcgttgtaaagcttgtgactttgatttgtgtttgtattgtgctactttgccaaaaaagatatggcacaggaatgatgggcaccctctcactttatgttgtgaggaaaaggaagaggcgagcgataaatattggtgcgacatttgtgagaaggaattagatccaagtatatggttctatacatgttttgattgtggagtcaccttgcatgctcagtgtgtattaggagatttctcacgtctcgtgctaggacaaaactattggtttggggaaaaagtcaagtttggggcggttcctaacaatcgcaacactcggccattatgcatccagtgtcaatctcgatgcaaggtctccgtcatcctaaaggaacgtaatgaatacaatcggtatatatgttcccgttcatgtttattgagttatttgggtgaaaaaatttga

SEQ ID NO: 1190 - protein, 652 aa, Arabidopsis thaliana
MATTAVNLPIHEHPLYPSARCIIGECDGCHVNGYMYNGYFCNEPFCFIWFHKECAEAPAEISHSSHHQHPLLLTNDSIDGPCDLCGQKLLPPCYSCSTCEFKVDLTCAMKPSPPAIEHPLCHHHSLVFLKKREEKVSCELCKDSIAGPSYSCLECDVYFHVNCIQLSKEVNHPCHSAHPLKLIPFESLTDDAETTCLLCGKKPAENMLYHCSVCNFTSCLGCTKNPPLLVIEHIKTHKHPLILFPRRIPCICDICGKKCEFAVYVCPQCDFVTARGCIDLARVININRHDHRIYLTHHLGTGYSKCGVCHENVNQYKGAYSCSVCPHYAVHSTCAVRTDVWDGVELEGTTEITEDNSPFKVVGDNLICHFSHEEHPLRFQKDDVFIHDEHKRCAACIHPLGFGSIYCCETCPFILHEKCANLPMKKRLVFGTRPYTLMKETTQLTDCTLCGIFSDGFAYSSRWLDVDVHCGSLNEPLVHDGHIHPLNFDKMEGHFCDGCKKNIDDYMLRCKACDFDLCLYCATLPKKIWHRNDGHPLTLCCEEKEEASDKYWCDICEKELDPSIWFYTCFDCGVTLHAQCVLGDFSRLVLGQNYWFGEKVKFGAVPNNRNTRPLCIQCQSRCKVSVILKERNEYNRYICSRSCLLSYLGEKI

SEQ ID NO: 1191 - DNA, 1959 bp, Arabidopsis thaliana
  CDS (1)..(1959)
atggattccgaaggagtgttaatgccgttgatccacaagcatcgtatgatgccttggaatgatctgagaagaggtgattgctgtggccgttttgaatctatttgtgatggttattactgcaaaatctgtgatattttcgtccacaagaaatgtggcgagtcctccgaatatatcgagcatccatctcaccccaatcacactcttcagcttctaagtactagaggaaatagccatgactgtgatttatgtggaaagaacatcggggatctattctatcgttgtgagatctgtgacttcgacatggatctatactgtgccaagtatccaccaccagaggttattaacatttccaagacgcatcaccacaagctcaaccttctcaaggagctgatccagtttgactattgcgtatggcatccgccagaggtaaatcacactttagaggtaaaccactcttaccactccttgcaccctcttaagcttcacactggtcaactaccgaattattctgaccgaaaatgtcgtctatgcgcaaaagaaattgaagttggattgttttatcattgttctttgtgtaatttcaccttggatatgtcttgtgttttaaatccaccacaacgatatctttggaatttgaaagctcatgaccaccaactcaccctgctcccaagtctccgttcttttttatgtagtgcttgcggtttgaatggcgaccgaagcccttacatatgtgttcaatgtgactttatgatccatcaagtctgtcttcatcttcctcgtgtcataaacattaatcggcatgatcaccgcgtctctcgaacttctgttcttggtgttgttaattcggtatgtggagtttgtcgccagaaggtggattggacttgtggaggtttttcttgtccgaggtgtcctggctatgccgctcattccctatgtgctactagagaagatgtgtggaacggaaaagaactcgaaggagtacccgaagaaatagaagatatagagccatatgtggtaatagatgacaatacaatacaacatttcagccacaaagagcattacctaagactccacgttaatagtgttctttgtgatgacaacaagcggtgcagcgcatgcacccatccaatctgtctccaatctttctacggttgtatggattgtgacttcattctccaccaaaactgcgctggatttcttagaatgaaatggcatgtgctacacaatgaacgtcttactctagttactaatgagactgaagtctttaagtgttatgcttgtgagagatggtccaatggtttcaggtaccagcaagggtataaatcattcgatgttcggtgcggttcaatttctgagccatttttccatccaagtcatcccgatcatcccttatattgcattttaccttacggaaaaatattctgcaatggttgttacaagttcaaatatggaatgctcgtgtgcgttgaatatgaatgtaatcatttaatatgcttcaattgcgctactctaccaccagtggtaaagcatagagttgacgatcatcctctctcactatgctatggtgaaaaggctagtggtatatgttggtgtgacatttgtgaagccaaagccgatccagagatatggttctacacgtgtaaagaccaacgtgctagtttacatacaagttgtgtgcttggagacttttcagggctcatgccgggaagcacactcaagagtgcgagcaattcatctgaggtgctgctcaacaatattgtatctcgtccattttgcagctttttagagctcatgccgggaagcacgctagagagtgcgggcaaatcagttgaggtggggctcaataaaagtacatctcgtccattttgcatctcgtgtaagttgcattgcatttttcctatcatcttgaaaagacttggaacctcagatgaatacttttgctctattctatgcatctga

SEQ ID NO: 1192 - protein, 652 aa, Arabidopsis thaliana
MDSEGVLMPLIHKHRMMPWNDLRRGDCCGRFESICDGYYCKICDIFVHKKCGESSEYIEHPSHPNHTLQLLSTRGNSHDCDLCGKNIGDLFYRCEICDFDMDLYCAKYPPPEVINISKTHHHKLNLLKELIQFDYCVWHPPEVNHTLEVNHSYHSLHPLKLHTGQLPNYSDRKCRLCAKEIEVGLFYHCSLCNFTLDMSCVLNPPQRYLWNLKAHDHQLTLLPSLRSFLCSACGLNGDRSPYICVQCDFMIHQVCLHLPRVININRHDHRVSRTSVLGVVNSVCGVCRQKVDWTCGGFSCPRCPGYAAHSLCATREDVWNGKELEGVPEEIEDIEPYVVIDDNTIQHFSHKEHYLRLHVNSVLCDDNKRCSACTHPICLQSFYGCMDCDFILHQNCAGFLRMKWHVLHNERLTLVTNETEVFKCYACERWSNGFRYQQGYKSFDVRCGSISEPFFHPSHPDHPLYCILPYGKIFCNGCYKFKYGMLVCVEYECNHLICFNCATLPPVVKHRVDDHPLSLCYGEKASGICWCDICEAKADPEIWFYTCKDQRASLHTSCVLGDFSGLMPGSTLKSASNSSEVLLNNIVSRPFCSFLELMPGSTLESAGKSVEVGLNKSTSRPFCISCKLHCIFPIILKRLGTSDEYFCSILCI

SEQ ID NO: 1193 - DNA, 2004 bp, Arabidopsis thaliana
  CDS (1)..(2004)
atggactctgatggagtgtcagtaccgttgatccacgagcatcttatgatgccttgtaatgatttgaggagaggtgattgttgtgagcgtttggaagctatcagtgatggctactattgcacaacctgcgatttcttcgtccacaagaaatgtggtgacgaggcctctgaatgcattgaaaatccatttcattccaatcaccctcttcggcttggttttctttctcgtcttcagcgccaacattggcttaaagtagttcgcagttgtgatttatgtggaaagaacatcggggatctattctatcgttgtgagatctgtgacttcgacatggatttacactgtgccaagtatccaccactagaggttattgacattcccgagatgcatagccacaagctcaaccttctcaaagatcgggtcgagtttgattgtgatgctaaatgtgggaagattggttatgggtttccttacgaatgtcatgaatgtgattcaaagttccatgtggattgcgtaaggtactcctcatcggaggaagtaaaacatcctttagaggtaaaccactcttaccactccttgcaccctcttaagctcctcatgggtcaaccaccagactactctgatggaaaatgtcgtctttgcggaagaaagattgatgataaattgttttatcactgctcttcttgtaactttaccttggatatgcgttgtgttttaaatccaccaccaaaatctgttttggatttgaaaactcatgatcatcaactcaatcttctcccaaggctcattttttttacatgtaatgcttgcgggctgaatggagatcgaagcccttacgcatgttttcaatgtgatttcttgatccacaaagattgttttggtcttccacgcctcattaacatcaatcggcatgatcatcgtatttctagaacttctcttattggtattgtgaattctgtatgtggagtttgtcgccagaaggtggactggacttgtgggggttattcttgtcaacggtgttcgacctatatcgctcattcaaaatgtgctactagagaagatgtgtggaatgggaaggaacttgaaggagtacctgaagaaatagaagatatagagccatatgtggtaatagatgacaacacaatacaacatttcagccacaaagagcattacatgaggctcaatgttaatggccttatgtgtgaggtgaacaagcggtgcaatgcatgcaaccaccccatctctcctcaatccttctatggctgtatggattgcgatttcatcctccaccaaaattgcgctggatttcctagaaggaaatggcatgtgctacacaatgaacggcttgctttagtcactagcgaggttaatattttcgggtgtagtgcttgtcacaaaattttcaatggttttagatacgagcatgaggatacaaaattagatgtcctttgtggttcattttctgagccatttatccatccaagtcatcctcatcatccgttatattgcatttcacctgaggatgatgaagtatgcagtggctgtaacgagaggagctatcatgtgcttagatgcattgaagacaattgtgggtttatcttggattttggttgcgccacttttccacaagtggtaaagcatagaattgaagaccaacctctttctctatgctatggtgaaaaggcaagtggaaaatattggtgtgacatttgtgaaaaggaaaccaatccaaacacatggttctacacatgtaaagatcatcgggcaagtttgcatacatggtgtgtgcttggagactttatggggctcataccaaaaagcacaatagagctatggaacatatcatatgaagtggtgctcaataatagtatttctcgcccaatttgcaggcactgtaagtcgcattgcattccccctattatcttaaagaagattggaacctcagatccatacttttgttctctggactgcatagagagtttcaaaaggctttggcgagcaaagtga

SEQ ID NO: 1194 - protein, 667 aa, Arabidopsis thaliana
MDSDGVSVPLIHEHLMMPCNDLRRGDCCERLEAISDGYYCTTCDFFVHKKCGDEASECIENPFHSNHPLRLGFLSRLQRQHWLKVVRSCDLCGKNIGDLFYRCEICDFDMDLHCAKYPPLEVIDIPEMHSHKLNLLKDRVEFDCDAKCGKIGYGFPYECHECDSKFHVDCVRYSSSEEVKHPLEVNHSYHSLHPLKLLMGQPPDYSDGKCRLCGRKIDDKLFYHCSSCNFTLDMRCVLNPPPKSVLDLKTHDHQLNLLPRLIFFTCNACGLNGDRSPYACFQCDFLIHKDCFGLPRLININRHDHRISRTSLIGIVNSVCGVCRQKVDWTCGGYSCQRCSTYIAHSKCATREDVWNGKELEGVPEEIEDIEPYVVIDDNTIQHFSHKEHYMRLNVNGLMCEVNKRCNACNHPISPQSFYGCMDCDFILHQNCAGFPRRKWHVLHNERLALVTSEVNIFGCSACHKIFNGFRYEHEDTKLDVLCGSFSEPFIHPSHPHHPLYCISPEDDEVCSGCNERSYHVLRCIEDNCGFILDFGCATFPQVVKHRIEDQPLSLCYGEKASGKYWCDICEKETNPNTWFYTCKDHRASLHTWCVLGDFMGLIPKSTIELWNISYEVVLNNSISRPICRHCKSHCIPPIILKKIGTSDPYFCSLDCIESFKRLWRAK

SEQ ID NO: 1195 - DNA, 1956 bp, Arabidopsis thaliana
  CDS (1)..(1956)
atggattctaagggagtggtgtcactaccgttgatccataaccatcaaatgatgccttggaatgacctgaggaaaggtgattgttgtggtcactttgaagctatcagcgatggctactattgcaaaagatgtgattttttcgtccacaagacatgtggtgacggtgtctccgaatatatcgagcatccatctcaccccaatcacactcttgagctttgtagtaacttacgttttcactgtgatttatgtggaaggcgcaccaattacctatcctattattgtgagatctgtggctttatcgtggatctacactgtgccatgtacccaccgccagagtttattgaaaattccgagaggcatcaccacaagctcacccttctcaaggagcggatcgcggcgttcgattgtgatgctaaatgtggaaagattagtggtaatgaatttgcttacaaatgtcaagagtgtgatttaaccttccatgtggattgcgtatggcatccgtcagaggtatatcaccctttagaggtaaaccactcttaccacccctcgcaccctcttaagctccacacaggtcaacgaccggactattctgatggagcatgtcgtctttgcgcaagaaagattgatgatagatatttttatcattgttcttcttgcaacttcaccttggatatgcgttgtgttctacatccaccacaacaatctcttctgaatttgaaagctcatgatcaccaactcacccttctcccaagacttgattcttttacatgtaatgcttgcgggctgaagggagatcgaagcccttacgtgtgttttcaatgtggtttcatgatccatcaagactgtctttcccttccacgcctcataaacattaatcggcatgatcaccgtgtttcgcgaacttctgttcttggtgttgtgaattctgtgtgtgaagtttgtcaccggaaggtggattggacttgtggaggtttttcttgtcagaggtgctccggctacgtcgttcattcaaaatgtgctaccaacaaagatgtgtggaacgggaaagaactcgaaggagtacctgaagaaacagaagatatcaaaccatttgtggtaatagacaacaacacaatacaacatttcagccacaaaaaacattacctaagactccacgttaatggtgttctttgtgacgacaagaagcggtgcagagcatgcactcatcccatatgtctccaatctttctacggctgtatggattgtgacttcattctccaccaaaactgcgctggatttcctagaaagagatggcatgtgctacacaatgaacgtcttactctagtttcatacgagtatgatttctttcagtgtcaagcttgtaatagattttccaatggtttcagttaccagtattcgggcattacattcgatgttgggtgcggttcaatctctgagccgtttgtccatccaagtcatcccgatcatcccttatattacactttactagatgaagagactaagagtagttgcaatggctgcaataagagttcttattctgtgctaaggtgcattgaagacgattgcagatttgccatatgcttcaaatgcgccacttttccacaagtggtaaagcatagagttgacgatcatcctctctcactatgctttgacaaagaggctagtggtaaatactggtgtgacatttgtgaaaaagaaaccaatccagagacatggttctacacatgtaaagattaccgggctagtttgcatataaagtgtgtgctcggagacttttcatggctcatgccaggaagcacgatagatcttagcgaattatctaaggtggtactcaataatagtatatcgcgtccattttgcagcgggtgtaagatgcattgcatttttcctatcatcttgaagatagttggaacctcagataagtacttttgctctattgaatgcgcctttggatag

SEQ ID NO: 1196 - protein, 651 aa, Arabidopsis thaliana
MDSKGVVSLPLIHNHQMMPWNDLRKGDCCGHFEAISDGYYCKRCDFFVHKTCGDGVSEYIEHPSHPNHTLELCSNLRFHCDLCGRRTNYLSYYCEICGFIVDLHCAMYPPPEFIENSERHHHKLTLLKERIAAFDCDAKCGKISGNEFAYKCQECDLTFHVDCVWHPSEVYHPLEVNHSYHPSHPLKLHTGQRPDYSDGACRLCARKIDDRYFYHCSSCNFTLDMRCVLHPPQQSLLNLKAHDHQLTLLPRLDSFTCNACGLKGDRSPYVCFQCGFMIHQDCLSLPRLININRHDHRVSRTSVLGVVNSVCEVCHRKVDWTCGGFSCQRCSGYVVHSKCATNKDVWNGKELEGVPEETEDIKPFVVIDNNTIQHFSHKKHYLRLHVNGVLCDDKKRCRACTHPICLQSFYGCMDCDFILHQNCAGFPRKRWHVLHNERLTLVSYEYDFFQCQACNRFSNGFSYQYSGITFDVGCGSISEPFVHPSHPDHPLYYTLLDEETKSSCNGCNKSSYSVLRCIEDDCRFAICFKCATFPQVVKHRVDDHPLSLCFDKEASGKYWCDICEKETNPETWFYTCKDYRASLHIKCVLGDFSWLMPGSTIDLSELSKVVLNNSISRPFCSGCKMHCIFPIILKIVGTSDKYFCSIECAFG

SEQ ID NO: 1197 - DNA, 1977 bp, Arabidopsis thaliana
  CDS (1)..(1977)
atggattctaagggagtgttaatgccgttgatccacgagcatcttatgatgccttggaaaaatctgaaaagaggtccttgctgtggttgctgtggacgctttgaagctatcagtgatggatactactgcaaaacctgcgattttttcgtccgaaaaaattgtgctgacgagccctccgaatatatcaagcatccatctcaccccaagcacactcttcagctgctaagacctgaaagacctactaatttctgcaatttgtgtggaaggatgtgcccaatattctatcgttgtgatctatgtgacttcgacatggatttatactgctcaaagtatccaccaccagaggttattgacatttccaagacgcatcaccacaggcttacccttctcaagaagtggatcaagcaatgtatatgtgctaaatgttgcaagattattggtaatgagtttccttacaattgtcatgaatgtgatttatcctttcatgtggattgcgtatggtatccgcccgaactagaactccgtttagaggtaaaccattcttaccactctttacaccctcttaaactctacgcaaagggtcagttaccggattattctgatgggaaatgtcgtctttgcgcaagaaagattgatgaaacattttttttccattgttctccgtgtaactttaccttggacaaggtttgtgttttgcgcccaccacaacaatctcttctgaatttgaaagctcatgatcaccaactcacccttctcccaaaactcgattcttttacatgcaatgcttgcgggctgaagggagatcgtagcccttacgtatgttttcaatgtggtttcatgatccatcaagactgtcttggccttccacgcctcatcaacattaaccggcatgatcaccgtgtttctcgaacttctgttcttggtgttgtgaattctgtatgtggagtttgtcgcaaaaaggtggactggtcttatggaggtttttcttgtcagaggtgtcatggctatgttgttcattcaaaatgtgctactagaaaagatgtgtggaatgggaaagaacttgaaggattacccgaagaaacagaagatatagagccatatgtggtgatagatgaaaacacaatacaacattttagtcacaaagagcattacctaagactcaacgttaatggtgttctatgtgatgacaacaagcggtgcaaggcatgcacccatcccatctgtctccagtctttctacggctgtatggattgtaacttcattctccaccaaaactgcgctggatttcttagaatgaaatggcatgtgctacacaatgaacgtcttacgttggttacaaacaaggatgaaggctttaggtgttatgcttgtgatagattgtccaatggtttcaagtaccagcatgggaataaggcattcgatgttcggtgcatttcaatttctgagccacatatccatccaagtcatcctaatcatcccttatattactttccatcagacgaagtacaatggtgcactggttgcaacatggagcaggactttgtgcttagttgcattgaagataattgtggatttttattatgctttggatgcgccactttaccacaaatggtaaagcatagagttcatgatcatcctctctcactatgctatggcgaaaaggcaagtggtaaatattggtgtgacatttgtgaaaaagaaacaaatccacatacatggttctatacgtgtaaagatcatcaggctagtttgcatacaaagtgtgtgcttggagacctttcaagtctcatgcgaagaagcacaataaaaattgagggcacttcatatgaggtggtgctcaataatagtatatctcgtccattttgcagctggtgtaagatgcattgtatttttcctatcatcttgaagacacttggagccacgaatgaatactcctgctctcttgaatgtgcagagtgtagatatacagaccgttaa

SEQ ID NO: 1198 - protein, 658 aa, Arabidopsis thaliana
MDSKGVLMPLIHEHLMMPWKNLKRGPCCGCCGRFEAISDGYYCKTCDFFVRKNCADEPSEYIKHPSHPKHTLQLLRPERPTNFCNLCGRMCPIFYRCDLCDFDMDLYCSKYPPPEVIDISKTHHHRLTLLKKWIKQCICAKCCKIIGNEFPYNCHECDLSFHVDCVWYPPELELRLEVNHSYHSLHPLKLYAKGQLPDYSDGKCRLCARKIDETFFFHCSPCNFTLDKVCVLRPPQQSLLNLKAHDHQLTLLPKLDSFTCNACGLKGDRSPYVCFQCGFMIHQDCLGLPRLININRHDHRVSRTSVLGVVNSVCGVCRKKVDWSYGGFSCQRCHGYVVHSKCATRKDVWNGKELEGLPEETEDIEPYVVIDENTIQHFSHKEHYLRLNVNGVLCDDNKRCKACTHPICLQSFYGCMDCNFILHQNCAGFLRMKWHVLHNERLTLVTNKDEGFRCYACDRLSNGFKYQHGNKAFDVRCISISEPHIHPSHPNHPLYYFPSDEVQWCTGCNMEQDFVLSCIEDNCGFLLCFGCATLPQMVKHRVHDHPLSLCYGEKASGKYWCDICEKETNPHTWFYTCKDHQASLHTKCVLGDLSSLMRRSTIKIEGTSYEVVLNNSISRPFCSWCKMHCIFPIILKTLGATNEYSCSLECAECRYTDR

SEQ ID NO: 1199 - DNA, 1959 bp, Arabidopsis thaliana
  CDS (1)..(1959)
atggattctgagggagtgtcactgccgttgatccacaagcatcatatgttgccttggaatgatatgaggaaaggtgattgttgtagacgttttgaagctatcagtgatggctactattgcaaaacctgcgattttttcgtccacaagagctgtggcgataggtcctccgaatatatcgagcatccatctcacccaagtcacgctcttcagcttctacgtaaaccaggtcatacacgtaactgtaacttatgtggcatctctatcaagagtctattctataattgtgagatctgtaacttcaacgtgcatatgtattgtgccaagtatccaccaccacaagttattgacatttccgagacgcatcaccacaagctcaacctttacaagaagccgaattatatcgactgtggggataaatgtgggaaactttcttatgagttttcttacaaatgtcaagaatgtgatttagcattccatgttgattgcgcatggcgcccatcagagtcaaatctcccgttagaggtaaaccatttttaccactccttacaccctcttaagctcgtaagaggtaaattaccggactattctgacagaaaatgtcgtctttgcggaagatatattggtgatagattgttttatcactgttcttcgtgtaacttcaccttggatatgcgatgtgttttaaatccaccacaacaatctcttctgaatttgaaagctcatgaccaccaactcacccttctcccaaggctcgattctttcacatgtaatgcttgtgggctgaagggagatcgaagcccttatgtatgttttcaatgtggttttatgattcatcaagactgtcttgaccttccacgcgttataaacattaatcggcatgatcaccgtgtttctcgaacatctgttcttggtgttgtcaagtctgtatgtggagtttgtcaccagaaggtggattggacttgtggaggcttttcttgtcagaggtgtcatggctatgtcgttcattctaaatgtgctactagaaaagatgtgtggaatgggaaagagcttgaaggagtacccgaagaaacagaagatatacaaccatatgtggtaatagatgaaaacacaatacaacatttcagccacaaagagcattacctacgactccatgttaatggtgttctttgtgacgacaacaagtggtgcagtgcatgcacccatcccatctgtctccagtccttttacggctgtatggattgtgacttcattctccaccaaaactgcgctggatttcgtagaatgaaatggcatgtgctacacaatgaacgtcttactcttgttataaacgaagctgaaccctttaggtgttatgcttgtgatagatggtccaatggtttcagataccatcaaggaaacatcacattcgatgttcggtgcggttcaattgctgagccatttcttcatccgagtcatcccgatcatcccttatatcacactttaccagatggagggattaagatttgcaatggctgcaaaaatggtttctatgatgtgctaggatgcattgaagatgattgcagatttgccatatgcttcaaatgcgcaacttttccacaagtggtaaagcatagagttgacgaccatcctctctcactatgctatggcgaaaaggctagtggtaaatattggtgtgatatttgtgaaaaagaaaccaatccagagatatggttctacacgtgtaaagactaccaggctagtttgcatatagagtgtgtggtcggagccctttcattgctcatgccaagaagcacaataaacccttgggaaaaatcatatgaggtggtgctcaataatagtgcatctcgtccattttgcagctattgtgagttgcgttgcatttttcctatcatcttgaagagacttggatcctccgataactacgtttgctcttacttttgcgctttgttttgcatctga

SEQ ID NO: 1200 - protein, 652 aa, Arabidopsis thaliana
MDSEGVSLPLIHKHHMLPWNDMRKGDCCRRFEAISDGYYCKTCDFFVHKSCGDRSSEYIEHPSHPSHALQLLRKPGHTRNCNLCGISIKSLFYNCEICNFNVHMYCAKYPPPQVIDISETHHHKLNLYKKPNYIDCGDKCGKLSYEFSYKCQECDLAFHVDCAWRPSESNLPLEVNHFYHSLHPLKLVRGKLPDYSDRKCRLCGRYIGDRLFYHCSSCNFTLDMRCVLNPPQQSLLNLKAHDHQLTLLPRLDSFTCNACGLKGDRSPYVCFQCGFMIHQDCLDLPRVININRHDHRVSRTSVLGVVKSVCGVCHQKVDWTCGGFSCQRCHGYVVHSKCATRKDVWNGKELEGVPEETEDIQPYVVIDENTIQHFSHKEHYLRLHVNGVLCDDNKWCSACTHPICLQSFYGCMDCDFILHQNCAGFRRMKWHVLHNERLTLVINEAEPFRCYACDRWSNGFRYHQGNITFDVRCGSIAEPFLHPSHPDHPLYHTLPDGGIKICNGCKNGFYDVLGCIEDDCRFAICFKCATFPQVVKHRVDDHPLSLCYGEKASGKYWCDICEKETNPEIWFYTCKDYQASLHIECVVGALSLLMPRSTINPWEKSYEVVLNNSASRPFCSYCELRCIFPIILKRLGSSDNYVCSYFCALFCI

SEQ ID NO: 1201 - DNA, 2970 bp, Arabidopsis thaliana
  CDS (1)..(2970)
atgggtcttatcaaccaatggtttccactggacactcttgcaactccagagcgtatcaggatggcttgtttcgacgagtttacttctcctttttatatgaccatggattctgagggagtgttaatgccgttggtccatgaacatcttatgatgccttggaatgatctaaggaaaggtgattgttgtggactctcgaaagctgtcagtgttggttattattgcaaaagctgcgattttttcgcccacaagaaatgtggcgagtcctccgagtttatccaacatccatctcaccccaatcacactcttcagcttcgaagtagcgaaggctgtaatagctgcaatttatgtggaaggaccattagtgacctattctatcgttgtgatctctgtgatttcgacgtggatctatattgtgccaagtatccaccaccagaggttattgacattcctgagacgcatcaccacaagctcaaccttcacaaggagttgatcgagttcaactgtgatgctaaatgtgggaagattactggtgctgagtttccttacgtatgttatgaatgtcaattacctttccatgtggattgcgtatggcggccatcggagttaaaacacccatcagaggtaaaccattcttaccactccttacaccctcttaagctcctctcaggtcaattaccggataattgtgatggaaaatgtcgtctttgcgcaagaaagattgatgatagattgttctatcattgttctccgtgcaacttcaccttggatctacgttgtgttttaaacccaccacaacaatctcttctgaatttgaaagctcatgatcatcaactcacccttctcccaagactcttgtcatttacatgtaatgcttgcgggttgaatggagatcgaagcccttacacttgtgttcaatgtgatttcatgattcatcaagattgtcttgacttaccacgcgtcataaacattaatcagcatgatcaccgtgtttctcgaacttctgttcctggtgttggaaattctaagggagtgttactaccgtggtttcacaggaagcatataatgatgccttggaatgatatgaggaaaggagattgttgtggaagtttggaatctgtcactgacggcttctattgcaaaagctgcgatattttcatccacaagaaatgtggcgagtcctccggaattatcgaccactcatctcaccccgatcacactcttgagcttaaccgttatcctaataaaagttgcaatttatgtggaaggtccaaaggtgtgaatgtatgctatcgttgtgatcactgttactaccaattggatctatattgtgccaagtacccaccaccagagtttattgacattcccgaaacgcatcaccacaagctcacccttctcaaggagcggattgagtttgattgtgatgctaaatgtggggagactggagatgggtttgcttacaaatgtcctgaatgtgatttattcttccatgtggattgcgtatggcatccgccagaagtaaatcaccctttagaggtaaaccactcttaccacccctggcaccctcttaagctccacacaggtcaaccaccacactattctgatggaacatgtcgtctttgtgcaagaaatattgatgatagattgttttatcattgctctccgtgcaacttcacattggatctgcgttgtgttttaaatccaccgccacaatctcttttgaatttgaaagctcatgaccaccaactcatccttctcccaagactccgttcttttacatgtaacgcttgcgggttgagtggtgatcgaagcccttacatatgtattcaatgtgactttatgatccatcaagattgtcttgaccttccacgcctcataaacgttaatcgtcatgatcaccgagtttcacgaacttctgttcttggtgttgtaaattctgtatgtggagtttgtcatcagaaggtggattggacttgtggaggtttttcttgtcagaggtgttctagctatgttgttcattcgaaatgtgctaccagaagagatgtatggaacgggaaagaactggaaggagtacctgaagaaatagaagatatagagccatatgtggtaatagatgacaatacaatacaacatttcagccacaaagagcattacctaagactccacgttaatgatgttctatgtaacgacaacaagcggtgcaaggcatgcacccatcccatctttcttcaatccttctacagttgtatggattgtgacttccttctccaccaaaattgcgctggatttcctagaatgaaaaggcatgtgctacacaatgagcgtcttactttagttactaacgagactaaactctttcagtgtgctccttgtgatagatggtccaatggtttcaggtaccaacatggatataagtcactcgatcttcagtgtggttcaatatccgagccatttgtccatccaagccatcccgatcatcccttatatcacactttactggatggaaggaatgagatttgtgatggctgcaaaaagagttggtattatgtgctaagttgcattgaagatgattgtagatttgtcttatgtttcaaatgcctcactttaccacaagtggtaaagcatagagttgacgatgatcctctcttgttatgctatggcgaaaaggcttgtggtaaatactggtgtgatatttgtgaaaaggaaaccaatccagagacatggttctacacgtgtaaagatcatcaatctagtatgcatacaatgtgtgtgcttggtgactctgtagggatcatgccaaaaagcacaataatgggttggtacaaatattatgaggtggtgctcaataatagtatatctcgtccagtttgcgagatgtgcaagtcgcgttgcatttttcctacgatcatgaagattcttgaagcctcaaatgaatacgtttgctctttagcatgcgtcctagagagggggtga

SEQ ID NO: 1202 - protein, 989 aa, Arabidopsis thaliana
MGLINQWFPLDTLATPERIRMACFDEFTSPFYMTMDSEGVLMPLVHEHLMMPWNDLRKGDCCGLSKAVSVGYYCKSCDFFAHKKCGESSEFIQHPSHPNHTLQLRSSEGCNSCNLCGRTISDLFYRCDLCDFDVDLYCAKYPPPEVIDIPETHHHKLNLHKELIEFNCDAKCGKITGAEFPYVCYECQLPFHVDCVWRPSELKHPSEVNHSYHSLHPLKLLSGQLPDNCDGKCRLCARKIDDRLFYHCSPCNFTLDLRCVLNPPQQSLLNLKAHDHQLTLLPRLLSFTCNACGLNGDRSPYTCVQCDFMIHQDCLDLPRVININQHDHRVSRTSVPGVGNSKGVLLPWFHRKHIMMPWNDMRKGDCCGSLESVTDGFYCKSCDIFIHKKCGESSGIIDHSSHPDHTLELNRYPNKSCNLCGRSKGVNVCYRCDHCYYQLDLYCAKYPPPEFIDIPETHHHKLTLLKERIEFDCDAKCGETGDGFAYKCPECDLFFHVDCVWHPPEVNHPLEVNHSYHPWHPLKLHTGQPPHYSDGTCRLCARNIDDRLFYHCSPCNFTLDLRCVLNPPPQSLLNLKAHDHQLILLPRLRSFTCNACGLSGDRSPYICIQCDFMIHQDCLDLPRLINVNRHDHRVSRTSVLGVVNSVCGVCHQKVDWTCGGFSCQRCSSYVVHSKCATRRDVWNGKELEGVPEEIEDIEPYVVIDDNTIQHFSHKEHYLRLHVNDVLCNDNKRCKACTHPIFLQSFYSCMDCDFLLHQNCAGFPRMKRHVLHNERLTLVTNETKLFQCAPCDRWSNGFRYQHGYKSLDLQCGSISEPFVHPSHPDHPLYHTLLDGRNEICDGCKKSWYYVLSCIEDDCRFVLCFKCLTLPQVVKHRVDDDPLLLCYGEKACGKYWCDICEKETNPETWFYTCKDHQSSMHTMCVLGDSVGIMPKSTIMGWYKYYEVVLNNSISRPVCEMCKSRCIFPTIMKILEASNEYVCSLACVLERG

SEQ ID NO: 1203 - DNA, 1980 bp, Arabidopsis thaliana
  CDS (1)..(1980)
atggattctgagggagtgttattgcggttgatccacgagcattctatgatcccttgtaatcatctgaggaaaggtgattgttgtggacgctttgaagctataagcgatggctactactgcaaaacatgcgattttttcgtccacaagaaatgtgtcgatgaggcctctgaatctatcgagcatccatctcatcccggtcacactcttcagcttctaagtaaacaaaaatatcgttattgtaatttatgtggaagggacattaaggatctatgctatcattttggtaacttcgacgtggatctatattgtgcaaagtacccaccaccagaggttattgaaagttctgagacaccatgccacaagcgcacccttctcaaggagaagatcgagtttcattgtgatgctaaatgtgaggagattggttatggctttccttacaaatgtcttgaatgtggtttgacctttcatatcgactgtgttttgcatccatccggggtaaaacacctgccagaggtaatccacccgctagacgtaaagaatcactcttgccaccccttgcaccctcttaagcttgttctcacaggtcaactaccagactattctgatggaaaatgtcgtctttgcgaaaaaaagatcgatagccctttgttctatcattgttctccatgtaacttcaccttggatatgcgttgtgctttaaacccgccatcaatatctttcgaggattcgaaaactcatgatcaccaactcactcttctcccaagactcgactcttttacatgtaatgcttgtgggctgaagggagatcgaagcccttacatatgtgttcaatgtaatttcatcatccaccaagagtgtcttacccttccacgccttataaacataaatcggcatgatcaccgtgttgctcgcactaatcttctgggtcttgtatattctgtgtgtggagtttgtcgccaaaaagtggattggacttggggaggttattcttgtcaaaggtgttctaactatgtcgttcattccaaatgtgctacaagaaaagatgtgtggaacgggaaagaactcgaaggagttattgaagaaacagaagatatagagccgtatgtggtaatagatgacaacacaatacaacatttcagccacgaagagcattacctaaaactcgacgacaatggtgttttatgtgatgaaaacaagcggtgcagcgcatgcacccattccgtttgcctcgaatccttctatggttgtatggattgtgacttcattcttcaccaaaactgtgctaaatttcctaaaaggaaacgacatgtgctacacaatgaacggcttactttatttacacgcgaggctggtcacttttggtgtaatgtttgtggtagaatctccaatggtttcagttaccaatatggggatatgaaattagatgtcatatgttgttcagtgttggagccatttgtccatccaagtcatcccgatcatcccttatattacatttcaccagagatggaagaagtctgcaatggttgtaacatgtcgggaactagaatgctcaggtgcattgaagatggttgtggatttgtcttatgcttcaaatgcgccactttaccgcgagtgttaaagcatagagttgacgattatcctctcttactatgctatggcgaaaaggcaaatggtatatattggtgtgagatttgtgagaaaaaaatgaatccagagaaatggttctacacatgtaaagatcaatgggctagtttgcacacagagtgtgtagtcggagacttttcagggctcatgccaggaagcgtagtaaaggctgagacgggatcatatgaggttgtgctcaacaagaatgtatctcgcccgttttgcaggcagtgtaagtcgcattgcatgtaccctatcatctataagatacctgaaacctcagtttcttatctttgctctgatatttgcataaagcgttttacaaagagagactga

SEQ ID NO: 1204 - protein, 659 aa, Arabidopsis thaliana
MDSEGVLLRLIHEHSMIPCNHLRKGDCCGRFEAISDGYYCKTCDFFVHKKCVDEASESIEHPSHPGHTLQLLSKQKYRYCNLCGRDIKDLCYHFGNFDVDLYCAKYPPPEVIESSETPCHKRTLLKEKIEFHCDAKCEEIGYGFPYKCLECGLTFHIDCVLHPSGVKHLPEVIHPLDVKNHSCHPLHPLKLVLTGQLPDYSDGKCRLCEKKIDSPLFYHCSPCNFTLDMRCALNPPSISFEDSKTHDHQLTLLPRLDSFTCNACGLKGDRSPYICVQCNFIIHQECLTLPRLININRHDHRVARTNLLGLVYSVCGVCRQKVDWTWGGYSCQRCSNYVVHSKCATRKDVWNGKELEGVIEETEDIEPYVVIDDNTIQHFSHEEHYLKLDDNGVLCDENKRCSACTHSVCLESFYGCMDCDFILHQNCAKFPKRKRHVLHNERLTLFTREAGHFWCNVCGRISNGFSYQYGDMKLDVICCSVLEPFVHPSHPDHPLYYISPEMEEVCNGCNMSGTRMLRCIEDGCGFVLCFKCATLPRVLKHRVDDYPLLLCYGEKANGIYWCEICEKKMNPEKWFYTCKDQWASLHTECVVGDFSGLMPGSVVKAETGSYEVVLNKNVSRPFCRQCKSHCMYPIIYKIPETSVSYLCSDICIKRFTKRD

SEQ ID NO: 1205 - DNA, 2469 bp, Arabidopsis thaliana
  CDS (1)..(2469)
atggatttcgattcacagcagaagccggagtcggaactgatctcactcattgagaaaataatctttgtcggcaaaccggagtcgcaattggtggtatcactcgtgacgcaaacaatctctctcatcagatctatagattcagatccggatacaaagcaggactcggagccggagctcatgtcactcatttctcaaatatactcgtatctcgaatctaggaattcagatgagctttcatcactccttgatcaaatagtctctctcgtcgagtctacatactcggagccgccagagatgaagctcgcctcactcattaagaaactaatgcctctcatagatacacagatcccaccaatctttacgggaaagtctctcacatacgatgcgaagcttctcctctatacgaagacgttagcgagccgggatgcaaatgtcgtatcactcatagttgaaattgtcactctggtcaactctacggatttggattcgctgccggagtcggagctcatgtctgtcgttactcaaacaatctctttcttcaactctatggatctggattcccagccggagccgctaaggaagcttatatcaatcttttctcaaaaatatttttcggattcagagttggagctggccctggattgggacttcatgtcgctcgttgataaaacattgacttttgagccggagccgaagctcatatcactcatccttgagatagtcacccttgtcttctccatgtatacacagtgggacaagcttatttccttatgtcctcgcttaaatgttagtttgaaagaggaaaagtttcatgtggagcccaaatacaagatgtggaacggcaagctggagtgtctccctttcaactggcagaaattctggttaacaagaggagaactcgcttcccattttctctgccaaggttgcaacggcaagaaccataaagaatataacaaggctccagctgagatcaaacacccttttcatcctaaacatcctcttctcctcgtctccttgcaaatgcttagtagcacgaggaaatgctattgttgcgatgaagatctcaagaatatcttttattattgctccgcttgcgagtttgctgttaattttgcttgtgtgcagaaaccaccagagttgtctatgcaccatcccaagtggcatgagcatactcttgctctgtttccaacgcagactccatttccttgcagcatctgtgccttgacacattcaagcggtcctttctatacatcaagcggtcctttctatacatgtcccccttgtgactttgttatccatcaaaagtgtttcagcttaccacgtgtcataaggatatctcgccatccccatcgtatctcgtttactccttcttttgaccctgaaaaatattggtcttgtggtgtttgtcgcagaaagatcgagaatgattatgggtgctattcttgcgtcaaggacggctgttcctatgcggctcattcgaaatgtgccacacagaccaatgtgtgggatggtaaagaacttgaaggagagccagaagaagacatggatgaagaagtcgagtcgtttgtgacgataagcgatggaattatacaacatttcagtcatgagcatcatcatatgagacttgatgtgaacacagacagagattacgacgagaataagttgtgtcaagcatgtaccacgcctatctattttggtaacttcttctcctgtatgcaatgtgatttcattctccatgagaaatgtgctaattttcgtcgtaaaatacatcatccgacacatcctcatctgctcactctatccagaacatacgaaggtgagcatcatgcgtttgcatgttcagcttgttctgtgtggtgcactgctggtttcttctatgagtgcaatgaagaagcatgttattttaaggtacatgtgcagtgcgccacaatttctgagccgttagtccacgaaagtcatatgcatcctttattcctaacatccaaaccagaagaggagcaaagaacatgtaatgtttgccataatttaagaaggggtggtagtgaaacattcaattgcattgaggagtgtaacttttctttgtgctttggatgtgctactatacctcataaggcgaggtataagcatgataagcatatgctcactatttcttatggggagaagactagtaccatgacgtattggtgtgaagtttgcgagggaaaaatagatccaaaggagcggttttacatgtgtgatgagtattgttgtgtcaccttacacatgccatgtatgcttggttgggacttatacatgaagcccggttcatcgtggataagaggcagtaaaaaagtatatgctttgccgaacaatcatcatatgtctagacctatttgcccccgttgtgagaggcgctgtccatacaaaacagttctcaaagagaatgaattagcattttgttccatattatgtattatgtggaagaagtaa

SEQ ID NO: 1206 - protein, 822 aa, Arabidopsis thaliana
MDFDSQQKPESELISLIEKIIFVGKPESQLVVSLVTQTISLIRSIDSDPDTKQDSEPELMSLISQIYSYLESRNSDELSSLLDQIVSLVESTYSEPPEMKLASLIKKLMPLIDTQIPPIFTGKSLTYDAKLLLYTKTLASRDANVVSLIVEIVTLVNSTDLDSLPESELMSVVTQTISFFNSMDLDSQPEPLRKLISIFSQKYFSDSELELALDWDFMSLVDKTLTFEPEPKLISLILEIVTLVFSMYTQWDKLISLCPRLNVSLKEEKFHVEPKYKMWNGKLECLPFNWQKFWLTRGELASHFLCQGCNGKNHKEYNKAPAEIKHPFHPKHPLLLVSLQMLSSTRKCYCCDEDLKNIFYYCSACEFAVNFACVQKPPELSMHHPKWHEHTLALFPTQTPFPCSICALTHSSGPFYTSSGPFYTCPPCDFVIHQKCFSLPRVIRISRHPHRISFTPSFDPEKYWSCGVCRRKIENDYGCYSCVKDGCSYAAHSKCATQTNVWDGKELEGEPEEDMDEEVESFVTISDGIIQHFSHEHHHMRLDVNTDRDYDENKLCQACTTPIYFGNFFSCMQCDFILHEKCANFRRKIHHPTHPHLLTLSRTYEGEHHAFACSACSVWCTAGFFYECNEEACYFKVHVQCATISEPLVHESHMHPLFLTSKPEEEQRTCNVCHNLRRGGSETFNCIEECNFSLCFGCATIPHKARYKHDKHMLTISYGEKTSTMTYWCEVCEGKIDPKERFYMCDEYCCVTLHMPCMLGWDLYMKPGSSWIRGSKKVYALPNNHHMSRPICPRCERRCPYKTVLKENELAFCSILCIMWKK

SEQ ID NO: 1207 - DNA, 2064 bp, Arabidopsis thaliana
  CDS (1)..(2064)
atgagttcggtgggtgtttttcataaggtggaaatggatgaaaacctatattttgtatacaaattaacacaaacagattatccaacctcttctggtgaagtactagccatggattccactggcgacgaccaacctcttgatcaacctctttttctatgtcctgatgcacgtatcaaatttcacaagctcaaaatacagagagaggatggtgatatttttgattatgatttcaagtttcatccatacatttcttcccctcacttccccagcaaaagaagcggtgatcaacaaggtgaatctttgcttgattgcgacgaagatggtatctgtaaactccctgtagtccctctcttttggtgcaacaataaagaaagtgattctcgcgaattccagtgcggtggatgcagagattcaatgctcagcgctagctattatgcatgtcttcaatgtgaaaaaaaattccacaaagaatgtgtagagtctcctcttgaaatcaaacacccaacccacctttttcattctcttcgactttactatcatccagcgcctgagttttgcatttgttgtaaaacagaagtcttcatgattttctatcattgtcttacctgcaatttgagtatgcatccagtctgtgcaatgaggaaagtacccttttttattgaccatccaaaaagccatccccaccctctcacttttttccctacacaagcttcgttagtttgccatttttgcgctttgattaagaagcttgatcccacatacatttgtaccaaatgtgtcttcgtaatccataaaggctgtatcggtttcccacatgtcataagaatatcccgtcacacccaccgtatctcttttacttcttctcttccatgtggaaagctttcttgtggagtatgtcatcagcaagtggacaacgattatggtgcatattcttgcaagaaatgtgatgcttattttgttcattcaaaatgtgcattacagagacatgtgtgggatggaaaagatctcgaagaagtgccagaagaagatgatatgatagatgatggtgagccgttcaagaggatagctgatggaataatactacatccttttcatagtcacaatctgcatcttcagacaactagagcttatgacgaaaatacgtattgtcgagggtgtgcccttccaatctacgaaggtcagttctattcatgcattgaaagcgacttcatcctccatgaacattgtgcaaatgctccacgcatgaagcgacatcccttacatccacatccacttacactagttgttgccaccaggggacctggtaatgaggaaggtacatttcaatgtgacgcatgtcatcgtaaaggtactggcttcttctatgagcatcatactgatcaagaaaacatcttcatgctagacatacattgtgcctctattttcgaaccctttcaatatcaaggccatgaacatccattattcctaccttcagaaccaaataaatggggaagatgtcagatgtgcacatacgaatacgttaatttaaatttaaattgcttggaatgcgattatattttatgtttccattgtgctaccttgccatacaaggtaaggtataagcatgacagtcattttctcaagatttgtaatgggaaggaggcaaatgatcaatcatactggtgtgagatttgtgaaggcaagatagaggaaggaacggaaagagcgttttacaatactccaaagaaggacacgtcattttacaaatgcaatgcctgctgcaccactcttcatcaacggtgcttacttgggatagatacttacatgaaacctggagaaactgtaaaagactacctttcttcaatcaagtatgcatctgaaggtcaaagcaaggaatcaatcacagatgttcagattcttctgaacagttctcccacccgaccaatttgcactcgatgtctttgtcgttgtccatttccaattttttttaaagggcataacacaatattttgttcttgggattgtgttgaagattcggccatgcgatcctaccaacgacttctctattcgtttctatggggttaa

SEQ ID NO: 1208 - protein, 687 aa, Arabidopsis thaliana
MSSVGVFHKVEMDENLYFVYKLTQTDYPTSSGEVLAMDSTGDDQPLDQPLFLCPDARIKFHKLKIQREDGDIFDYDFKFHPYISSPHFPSKRSGDQQGESLLDCDEDGICKLPVVPLFWCNNKESDSREFQCGGCRDSMLSASYYACLQCEKKFHKECVESPLEIKHPTHLFHSLRLYYHPAPEFCICCKTEVFMIFYHCLTCNLSMHPVCAMRKVPFFIDHPKSHPHPLTFFPTQASLVCHFCALIKKLDPTYICTKCVFVIHKGCIGFPHVIRISRHTHRISFTSSLPCGKLSCGVCHQQVDNDYGAYSCKKCDAYFVHSKCALQRHVWDGKDLEEVPEEDDMIDDGEPFKRIADGIILHPFHSHNLHLQTTRAYDENTYCRGCALPIYEGQFYSCIESDFILHEHCANAPRMKRHPLHPHPLTLVVATRGPGNEEGTFQCDACHRKGTGFFYEHHTDQENIFMLDIHCASIFEPFQYQGHEHPLFLPSEPNKWGRCQMCTYEYVNLNLNCLECDYILCFHCATLPYKVRYKHDSHFLKICNGKEANDQSYWCEICEGKIEEGTERAFYNTPKKDTSFYKCNACCTTLHQRCLLGIDTYMKPGETVKDYLSSIKYASEGQSKESITDVQILLNSSPTRPICTRCLCRCPFPIFFKGHNTIFCSWDCVEDSAMRSYQRLLYSFLWG

SEQ ID NO: 1209 - DNA, 2112 bp, Arabidopsis thaliana
  CDS (1)..(2112)
atggattcagagttagagctcatatcactcatttctcaactaataagtcttcccaagattctggattcgaaatggaattcagttactcattcggagattatatcactcattgctcaaataatctctctggtcagctcaatggatttgcattcacagccgaagccagagtcggagttcatgtcactagttactcaagcaatctcactctttgactccatggatttaaatcccgagctgagcccactgtcggagctcatatcactcctttctcaaatcatttctacggattcggattcggattcgaataggaaggtggagtgggacctcgatagacctctatgtgaaacattattcggtcagccagagccagaactcgtgtccctcatctatcaaatcttctccctcgtcagctctatcaattcaaagtcggagaagtttatttccttgtgtcctcaactattagtagaattggaaaaaggaaattttcatgtgagtgaatatttccagccttggggtaagtggtattgtctccctggaaactgggtgaaattcaagtttacaggagaagacgctacttattttggctgtaaaggatgcaacggcaagaaccatgaagaatatgaacaggctccggatgagatcaaacaccatctccaccgaaaacattctctccagcttgtctttttcagtgaaggcaaagagaggaaatgctattgttgcgatgatgatctcgaaaaggtaatttattgttgcgtgtcctgtgattatgctatgaatatggcttgtgcgaagaaaccaccagtcttatctatagaccatccgaagtggcatgagcatactcttgttctgtttccaagacgtgctttcttaacttgcaacctttgcggcttggctgatgcaagatctcctctttatatgtgtcccccttgtgactttgtggtccatctaagatgtatcgacttaccacgtgtcataaggatctcacggcatcaccatcgtatctcttttaccccttcttttgaccaagaaagattgtcttgtggtgtttgtcaaaaaaacatcgacaatgattatgggggatattcttgcatcaaggagggttgtttttatgcagcacattcaaaatgtgctacacaaagaaatgtgtgggatggtaaagaacttgagggagagcaagaagaagaaattaaagaagttgagccatttgtcaagataagcgatggaatcatacaacattttagtcatcaacatcatcatttgagacttgatgacaacataaatagagactacgatgagaacaaggagtgtcaagcatgcatcaggccaatctattttggtaacttctactcatgcatgcagtgtgagtttattctccacgaagaatgtgcaaatctttttcgccaaatttatcatcctatacatccacatatgctcagtctaggatatgacaatattgtagaccatgaggttatgtgtgcagcttacccttcgttgtggacagccggtttcttctacgagtgtggtaaagaaggatgtgatttcaagctacctgtgcagttcgccacaacatctgagccactagtccatgaaagccatatgcatcctttattcctaacatccaaacctgaagaggatccaagaagatgttcggtttgcaaagagagcagatatgctaggacaaatgaaacattcaattgcattgagtgtgactttgctttatgttttgtatgcgctactttacctcaaaaggtgaggtataagcatgataagcatgtgctcactcttttttatgggaacgagacaagtaccataacgtattggtgcgaaatttgcgagggaacaatagatccaacaaagcggttttatgtgtgtgatgagtactgttgtctcactctacacattaaatgtttgcttgggtgggacttatacatgaagcatggttcatcttcattttatttagagaaaacggtagacgttctgtccaataatcatcatatgactcgacctatttgctgctattgtgagaagcgttgtccatacaaaatatgtttggagtggtctggatcaatatattgttcgtcagattgtatttttactttcttgatattttaa

SEQ ID NO: 1210 - protein, 703 aa, Arabidopsis thaliana
MDSELELISLISQLISLPKILDSKWNSVTHSEIISLIAQIISLVSSMDLHSQPKPESEFMSLVTQAISLFDSMDLNPELSPLSELISLLSQIISTDSDSDSNRKVEWDLDRPLCETLFGQPEPELVSLIYQIFSLVSSINSKSEKFISLCPQLLVELEKGNFHVSEYFQPWGKWYCLPGNWVKFKFTGEDATYFGCKGCNGKNHEEYEQAPDEIKHHLHRKHSLQLVFFSEGKERKCYCCDDDLEKVIYCCVSCDYAMNMACAKKPPVLSIDHPKWHEHTLVLFPRRAFLTCNLCGLADARSPLYMCPPCDFVVHLRCIDLPRVIRISRHHHRISFTPSFDQERLSCGVCQKNIDNDYGGYSCIKEGCFYAAHSKCATQRNVWDGKELEGEQEEEIKEVEPFVKISDGIIQHFSHQHHHLRLDDNINRDYDENKECQACIRPIYFGNFYSCMQCEFILHEECANLFRQIYHPIHPHMLSLGYDNIVDHEVMCAAYPSLWTAGFFYECGKEGCDFKLPVQFATTSEPLVHESHMHPLFLTSKPEEDPRRCSVCKESRYARTNETFNCIECDFALCFVCATLPQKVRYKHDKHVLTLFYGNETSTITYWCEICEGTIDPTKRFYVCDEYCCLTLHIKCLLGWDLYMKHGSSSFYLEKTVDVLSNNHHMTRPICCYCEKRCPYKICLEWSGSIYCSSDCIFTFLIF

SEQ ID NO: 1211 - DNA, 1545 bp, Arabidopsis thaliana
  CDS (1)..(1545)
atggattgtcttttaaacccaccaccacagtctattttggatttgaaagctcatgctcaccaactcatctttcgcccaagacttgattcttttacatgtaatgcttgtgggttaaatggagatcgaagcccttacatatgtgttcaatgtgatttcatgatacatcaagagtgtttttcccttccacgcctcataaacatcaatcggcatgatcatcgtgttgctcgcacatctgttcttggtgttgtgaattctgtatgtggagtttgtcaccaaaaggtggattggacctggggcgggtattcttgccagaggtgtcctcaatatgtcattcattcgaaatgtgctactagaaatgatgtgtggaacgggaaagaactcgaaggagtccctgaagagatagaagatataaagccatacgtggtaatatatggcaacataatacaacatttcagccacaaagagcactaccttagattccatgttaatggctttttccgggatggaaacaagcggtgcagtgcttgcacctaccccattggtctccaatccttctatgaatgtattgattgtgattttatgcttcaccaaaactgtgctgaatttcctcgaaagaaatggcatatgctacacaatgatcgacttacattagttacaagcgtagccgaattcttttggtgtatagcttgtagaagaatgtccaatggtttcaagtaccagtgtgggtatggggtgttagatgttctgtgctgttcagtttcggagccgtttgtccatccaagccaccctgatcatcctttgtattacattcgacaagtgaaatatagacaatgctatggttgcaacggtcgaacgtataatgtgctgacgtgcattgaaagttgttgtggatttgtcttatgcttctgttgtgccacattaccacaagtggtaatgcatagagtagacgatcatcctctctcactatgctatggcgaaaaggcaagtggcaaatactggtgtgacatttgtgagaaagaattgaatccaagtacatggttctacacatctaaagatcaccgagctagtttgcatacaaagtgcgtgttaggagactttgcagggctcatgccaagaagcacaataaagtatggcagcagatcatatgaggtggtgctcaataatagtgtatctcgtccattttgcagggtgtgtgagtcgcattgcatgtaccctatcagcttgaagatgcttggaacctctgatccatatatttgctctttaaactgccaaaagcgtctcaactctctggacaacttgacgaaaaagctggaggctctatatgttttgaaaacaacaaagaaggagtctgatgatgacgatcgaacgcagctgcaggctctattacttgccgaggaaacagcaaagaaggagcctgattatgcggatcgaatgcagctggtgtgtatgtactgtaaatattgctgctatgcctcaacgaataaggtactaactctgaaaagacacatatatggaggatttgaagaccaacgactcgaaccctga

SEQ ID NO: 1212 - protein, 514 aa, Arabidopsis thaliana
MDCLLNPPPQSILDLKAHAHQLIFRPRLDSFTCNACGLNGDRSPYICVQCDFMIHQECFSLPRLININRHDHRVARTSVLGVVNSVCGVCHQKVDWTWGGYSCQRCPQYVIHSKCATRNDVWNGKELEGVPEEIEDIKPYVVIYGNIIQHFSHKEHYLRFHVNGFFRDGNKRCSACTYPIGLQSFYECIDCDFMLHQNCAEFPRKKWHMLHNDRLTLVTSVAEFFWCIACRRMSNGFKYQCGYGVLDVLCCSVSEPFVHPSHPDHPLYYIRQVKYRQCYGCNGRTYNVLTCIESCCGFVLCFCCATLPQVVMHRVDDHPLSLCYGEKASGKYWCDICEKELNPSTWFYTSKDHRASLHTKCVLGDFAGLMPRSTIKYGSRSYEVVLNNSVSRPFCRVCESHCMYPISLKMLGTSDPYICSLNCQKRLNSLDNLTKKLEALYVLKTTKKESDDDDRTQLQALLLAEETAKKEPDYADRMQLVCMYCKYCCYASTNKVLTLKRHIYGGFEDQRLEP

SEQ ID NO: 1213 - DNA, 1578 bp, Arabidopsis thaliana
  CDS (1)..(1578)
atgtggatcgagaatttatgctattgttgtaagatctgtgacttctatgtggatctattctgtgtcaagtacccaccaccagatgttatagacatttccgagacgcatcaccacaagctcactcatatcaagaagtggaccaagttcaactgtattgctaaatgtggtaagaagttttatgggtttccttacaaatgtctagaatgtcatttaatgttcgatatggattgcgtatggaacccaccggaggcaaaaaaccaatcagaggtaaacatttcttcccaccccttacaccctcttaagctacacacaagtcaaccaccagactattctgatgaaaaatgtcgtctttgcacaagaaagattgagggattgttttatcattgttcttcttgcaacttcagcttagatatgcgttgtgttataaatccaccaccacaatttgttatggatttgaaagttcatgatcacgaactcacccttctcccaagactcgactcttttacatgtaatgcttgcgggctgaagggagatcgaagcccttacatatgtgttcaatgtggtttcataatccaccaagactgtctttcccttccacgcctcataaacatcaatcggcatgctcatcgtgtttctcgcacttctgttcttggtgttgtgaactctgtatgtggtgtttgtcaccagaaggtagattggacttggggtgggtattcttgtcagaggtgtcctcaatatgtcgttcactcgaaatgtgctactagaaaggatgtgtggaacgggaaagaactcgaaggagtgcctgaagagatagaagatatagagccatatgtggtaattgatgacaacacaatacaacatttcagccacaaagagcattacctaagattccatgttaatggtcttctctgggaagaaaacaagcgttgcagtgcttgcacccatcccgttcgtctccaatcgttctatgcctgtaaagattgtgatttcattcttcaccaacactgcgctgaatctcctaaaaaagaatggcacgtgctacacaatgaccggcttactttagttacatgcgtggccaacttcttctcgtgtacagcttgtagtagattgtctaatggcttcatgtatcagtgtgattttatgaagttagatgttttgtgcggtttagtctcggagccgtatatccatccaggccatccccatcatcctttatattacatcccacaagtggaagaaaaacaatgcaatggttgcaacaatcgggaggttcgtgtgcttacgtgcatcgaaagtggttgtggatatgtcttatgcttcgattgcgccactttaccacaagtggtaaagcatagagtagacggtcaccctctctcactatgctacggcgaagaggcaagtggcaaatactggtgtgacatttgtgagaaagaaacgtatccaaagacatggttttacacgtgtaaagatcaccgagctagtttgcatacaaagtgcgtgctgggagacttagtaggactcatgccaagaagcacaatagattattatgacatatcatatgaggtggtggtcaatatatag

SEQ ID NO: 1214 - protein, 525 aa, Arabidopsis thaliana
MWIENLCYCCKICDFYVDLFCVKYPPPDVIDISETHHHKLTHIKKWTKFNCIAKCGKKFYGFPYKCLECHLMFDMDCVWNPPEAKNQSEVNISSHPLHPLKLHTSQPPDYSDEKCRLCTRKIEGLFYHCSSCNFSLDMRCVINPPPQFVMDLKVHDHELTLLPRLDSFTCNACGLKGDRSPYICVQCGFIIHQDCLSLPRLININRHAHRVSRTSVLGVVNSVCGVCHQKVDWTWGGYSCQRCPQYVVHSKCATRKDVWNGKELEGVPEEIEDIEPYVVIDDNTIQHFSHKEHYLRFHVNGLLWEENKRCSACTHPVRLQSFYACKDCDFILHQHCAESPKKEWHVLHNDRLTLVTCVANFFSCTACSRLSNGFMYQCDFMKLDVLCGLVSEPYIHPGHPHHPLYYIPQVEEKQCNGCNNREVRVLTCIESGCGYVLCFDCATLPQVVKHRVDGHPLSLCYGEEASGKYWCDICEKETYPKTWFYTCKDHRASLHTKCVLGDLVGLMPRSTIDYYDISYEVVVNI

SEQ ID NO: 1215 - DNA, 2007 bp, Arabidopsis thaliana
  CDS (1)..(2007)
atggaatatgaggaatatgaggaagtgtcactaccgttgatccacgagcatcttatgatgccgtgtaattatctaactagggctgattgctgtggacgcttcggttttaccagtggtggttattactgcgaaagctgtagcttcttggttcataggaaatgtgttgaagattcctctgaatatattgaacacccgtctcactctgttcaccctcttaagcttcaaagtaaaccagaccatatatgtgatatatgtgataagaggatcgtggatctatgctatcattgtgagatctgtgacttcaatgtggatctatactgtgcaaagtacccaccaccaaaagttattgatatttccgagacgcatcaccacaagctcacccttctcaagaaagggatcaagttcgactgtggtgctagcaaatgtggggaggttatgtatgggtttccttacaaatgccatgaatgtgatttagccttccatgtggattgcgtatggaatccgccggaggcaaaaaacccgtcagaggtaaaccactctcaccaccctttacaccctcttaagctccacataggtcaaccaccggactattctgatggtaaatgtcgtctttgcgcacaaaagatttgtgatagattgttttatcattgttctgcctgtaacttcagcttggatatgtgttgtcttttaaacccaccatcacaatatgttatggatttgaaagttcatgctcacgaactcacctttcgcccaagacttgattcttttacatgtaatgcttgcgggttgagtggagacagaaacccttacatatgtgtgcaatgtgatttcatgatacatcaagagtgtcttgaccttccacgcctcataaacatcaatcggcatgatcaccgtgtttctcgcacttccgttcttggtgttgtgaattcggtatgtggagtttgtcgccggaaggtggattggacttggggcgggtattcttgtcagcggtgtcctcactatgtcgttcattcgaaatgtgctactagagaggatgtgtggaacggaaaagagctcgaaggagtgcctgaagagatagaagatgtagagccatatgtggtgatagatgaaaacacaatacaacatttcagccacaaagagcattacctaagattccatgttagtgctcttctttgggaggaaaacaagcgttgcaatgcttgcacccagcccattggtctccaatctttctatggttgtgttgtttgtgatttcattcttcaccaaaactgcgctgaatctcctagaaagaaatggcattttctacataatgaacgtcttactttagttacaagcaaggatgattactttcactgcactgcgtgtgatagactctccaatggtttcatgtaccagtgtggggatatgaagttagatgtactgtgcggttcaatttctgaaccgtttgtccatccaagccacccccatcatcccttatattacattccaccagaggaagaaaaacaatgcaatggttgcgacaattggtcatctcttgtgcttacgtgcattgaaagtggctgtagatatttcttatgcttcgattgtgctaggctaccacaagtggtaaagcatagagtagacgctcatcctctctcactatgctatggagaaaaggcaagtggcaaatactggtgtgacatttgtgagaaagaaacgaatccgagtacatggttctacacgtgtaaagatcaccgagctagtttgcatacaaagtgcgtgatgggagactttgcaaggctcatgccaggaagtacattaacgtattcccacatatcatatgaggtggtgcgcaataatagtatgtctcgtccattttgcagagcgtgtgagtcacattgcatgtaccctatcatcttgaaggtgcttggatcctcagctctttacatctgctctttaaactgcgtagatggtttttggtatccgaagatcgtttctggtatcaaaaaacgtcaaccagcaaagtga

SEQ ID NO: 1216 - protein, 668 aa, Arabidopsis thaliana
MEYEEYEEVSLPLIHEHLMMPCNYLTRADCCGRFGFTSGGYYCESCSFLVHRKCVEDSSEYIEHPSHSVHPLKLQSKPDHICDICDKRIVDLCYHCEICDFNVDLYCAKYPPPKVIDISETHHHKLTLLKKGIKFDCGASKCGEVMYGFPYKCHECDLAFHVDCVWNPPEAKNPSEVNHSHHPLHPLKLHIGQPPDYSDGKCRLCAQKICDRLFYHCSACNFSLDMCCLLNPPSQYVMDLKVHAHELTFRPRLDSFTCNACGLSGDRNPYICVQCDFMIHQECLDLPRLININRHDHRVSRTSVLGVVNSVCGVCRRKVDWTWGGYSCQRCPHYVVHSKCATREDVWNGKELEGVPEEIEDVEPYVVIDENTIQHFSHKEHYLRFHVSALLWEENKRCNACTQPIGLQSFYGCVVCDFILHQNCAESPRKKWHFLHNERLTLVTSKDDYFHCTACDRLSNGFMYQCGDMKLDVLCGSISEPFVHPSHPHHPLYYIPPEEEKQCNGCDNWSSLVLTCIESGCRYFLCFDCARLPQVVKHRVDAHPLSLCYGEKASGKYWCDICEKETNPSTWFYTCKDHRASLHTKCVMGDFARLMPGSTLTYSHISYEVVRNNSMSRPFCRACESHCMYPIILKVLGSSALYICSLNCVDGFWYPKIVSGIKKRQPAK

SEQ ID NO: 1217 - DNA, 2304 bp, Arabidopsis thaliana
  CDS (1)..(2304)
atggattcggaggtggaggagaatgtcatatcggtcatcactgacacaacctttctcatctccacaaatttaaaggtggatccgagggtaatatcactcttttctcaactattctatgattggcgctctgtttatatggaaataaagtccctttacccgaagatggagttccatttactccttcgtcaaatactcaagttctggacctctacggacatgggtagacagtggaagtttgtatccctcatttgtaaaataatgtttctggttagctctatggatttggattcggagtcagagctcacatctctcatcaagaaaataatttctctcttcaactctaaacccgatacgggttcagagctcgtttccctcattacacagttgatgcgtatcgatacctctgtggattcggattcagagccaacacaagaatctgagcttctatcactcattagccaactagtctctgccaagccggagccggagctcacatcactcaccaggcggatcatctctaccttcatatctatgaattgggagcctatgcagtttatttccgtatgccctcaagttatggtggaacttgtacatggaaaactgacgacagaagttgtccggccgagaaaggctaaagagcgggaatgtgagttgtatgcttacgaaatttggaaatctacaagacaaatccattttcactgtatactatgcaatggcgagaaccatgaagagtatgacaaggttcctatagaggtcaaacaccctcttcacccaagacattctcttcagcttgccgttagacaatggtcggaggaggaaacgatgattgaatgttattgttgtgatgaatatctcatggattattattactattgctcctcttgcgattttgctatgaatgtaagctgtttggagaaaccaccaccagtcttatctatagaccatcccaagtggcatcagcatccccttattttgtttccaagtcaggcttcctttccttgtaacctttgtgccctcacacattcaagttgtcctttctatatttgtcccccctgtgacttcgtggtccatcaaaagtgtctcagcttaccacatgtcataaggatatcccgccaccatcatcgtatctccttcactccttcatttgagaaaggaaattggtattgtggtatttgtcgcaaaaagatggataatgattacggtggttatacttgcctcaaggacggttgttcgtatgtggcacattcaagatgtgcaacacaaaagaatgtgtgggatggtctagaccttgagggagagccagaagaagttgaagaagaagaagttgagccatttgtgataataagtgacggaacaatacaccattttagtcatccacatcatttgagaatggataagaataccggcagagactacgacgagaataagcagtgtcaagcatgcatcacaccaatctattttggtaacatctactcttgtatgcaatgcaacttcattctccatgaagaatgtgcgaatttttctcgcaaaatacataacccgatacatccacataagctcaatctagtgggaggatacgacggtgttaccaagtattataaggatttctgttcagtgtgtcctaggatgtgcaccaatggtttcttctatgagtgcggtaaagaagaatgtgatcgttttaagctacatgtgcagtgtgccacaatttctgagccattagtccatgaaagtcatgtgcatcctttattcttaacatccaaaccaagagaacgaagaagatgtggggtttgcaaaaaaaagccacttagccacacggaaacattcaattgtattgaaggtgagtgtacctttgctttgtgttttggatgtgctactttacctcacgaggtgaggtataagcatgataagcacatgctcactctttcttatggggaggagacaagtaccatgatgtattggtgtgaagcctgcgagaaagagataaattcagaagaacggttttataagtgtgatgaatattgttgtgtcaccctgcacattcaatgtttgattgggaaagaattatacttgaagcccggttcatcgtttgagtacgaccacaggcatgcagatgttcttttaaaaactcaggttatgtctcgacctatttgcttccaatgtaagagtcgttgtccacataacacagttatccagtggtctgagttagtatattgcaccattcattgttttttgtttggtcgactaagatgggacgaagaagaaagaagaagaaagcaagctgaaattgacaataaagatgtttga

SEQ ID NO: 1218 - protein, 767 aa, Arabidopsis thaliana
MDSEVEENVISVITDTTFLISTNLKVDPRVISLFSQLFYDWRSVYMEIKSLYPKMEFHLLLRQILKFWTSTDMGRQWKFVSLICKIMFLVSSMDLDSESELTSLIKKIISLFNSKPDTGSELVSLITQLMRIDTSVDSDSEPTQESELLSLISQLVSAKPEPELTSLTRRIISTFISMNWEPMQFISVCPQVMVELVHGKLTTEVVRPRKAKERECELYAYEIWKSTRQIHFHCILCNGENHEEYDKVPIEVKHPLHPRHSLQLAVRQWSEEETMIECYCCDEYLMDYYYYCSSCDFAMNVSCLEKPPPVLSIDHPKWHQHPLILFPSQASFPCNLCALTHSSCPFYICPPCDFVVHQKCLSLPHVIRISRHHHRISFTPSFEKGNWYCGICRKKMDNDYGGYTCLKDGCSYVAHSRCATQKNVWDGLDLEGEPEEVEEEEVEPFVIISDGTIHHFSHPHHLRMDKNTGRDYDENKQCQACITPIYFGNIYSCMQCNFILHEECANFSRKIHNPIHPHKLNLVGGYDGVTKYYKDFCSVCPRMCTNGFFYECGKEECDRFKLHVQCATISEPLVHESHVHPLFLTSKPRERRRCGVCKKKPLSHTETFNCIEGECTFALCFGCATLPHEVRYKHDKHMLTLSYGEETSTMMYWCEACEKEINSEERFYKCDEYCCVTLHIQCLIGKELYLKPGSSFEYDHRHADVLLKTQVMSRPICFQCKSRCPHNTVIQWSELVYCTIHCFLFGRLRWDEEERRRKQAEIDNKDV

SEQ ID NO: 1219 - DNA, 1413 bp, Arabidopsis thaliana
  CDS (1)..(1413)
atgcccaacaaatcacctcaatatgcaaatgaccgatgccatttttgtctgtgcaagcttaagactccgtttgctcgttgcacggtgtgcaacataaacattagtccactttgtatggtaaagcaaccaccactcactatttgtaacccaaagcaccacaagcatagcctcaccctcttggtaaggttagtcatctttacttgtaatgcatgtggtgtggaaggcgaccgcaatccttatgtatgtcttcaatgcaatctgatggtccacaaagactgtattgagaatctaccgcgagtcatatgcatcaatcggcacgatcatcgcatctttcatactttccatcttggtcaacgagaagaacattgggagtgtggagtttgtcggaagacggttgattgggtatatggagcttttaaatgctctcgttgtcctaattacgccgttcattcaagatgtgcaacgaaaaaggaagtgtgggatgggatcgaacttgaagatgtacccgaggaggaggaagaagtcgaagaaccatttgtggtaattaatgaaaaagagatcattcattttagtcatgaagaacatgttctcagattggatgagaattatgttacggataatgttaacatgcgttgcagaggttgcgttcttgccatcaacggtgattcctgctacaaatgcgtggaatgtgattatattcttcacaaagcatgtgctagtcttcctcggaagaagcgacatttgttgcataatcataaactcactctacaggttgacgaggctgcatcttcagattttgtgtgtacagcttgtagaacgtattctaatggtttcaggtacaagtgtttcgaaggttgcgaagatgatgttgtgtatgatgttcggtgtagttccgtatcggaaccatttcagcatgatctgcatccacatcccttatattggacattggaaagttccaaacgatgtcaagcttgtggcacggaaactgatgataatctcttaaattgtacggtttgtgatgattacgcattatgcatgaagtgtgccactttaccaagaaaggtaaaacataggtgtgatgatcattttctgtcactatgtcaaggtgtgggaaacgcaagcggcaacttgtggtgtgatatttgtgagaccaagacagatccaaatgtatgttactatacatgtgaagaatgtgggcttagtctccatcttaattgtgttcttggtgatttttattatgttaaggtaattcctgatcagccgaaagtatttgccaacaatggggttactcgacttttttgcggcgtttgtgaagttcgttgcaagtttcccttcatcatgtggggagctgtaggagactttactggctacgtttgttcgattaactgtgtattcccaaaagcggataaataa

SEQ ID NO: 1220 - protein, 470 aa, Arabidopsis thaliana
MPNKSPQYANDRCHFCLCKLKTPFARCTVCNINISPLCMVKQPPLTICNPKHHKHSLTLLVRLVIFTCNACGVEGDRNPYVCLQCNLMVHKDCIENLPRVICINRHDHRIFHTFHLGQREEHWECGVCRKTVDWVYGAFKCSRCPNYAVHSRCATKKEVWDGIELEDVPEEEEEVEEPFVVINEKEIIHFSHEEHVLRLDENYVTDNVNMRCRGCVLAINGDSCYKCVECDYILHKACASLPRKKRHLLHNHKLTLQVDEAASSDFVCTACRTYSNGFRYKCFEGCEDDVVYDVRCSSVSEPFQHDLHPHPLYWTLESSKRCQACGTETDDNLLNCTVCDDYALCMKCATLPRKVKHRCDDHFLSLCQGVGNASGNLWCDICETKTDPNVCYYTCEECGLSLHLNCVLGDFYYVKVIPDQPKVFANNGVTRLFCGVCEVRCKFPFIMWGAVGDFTGYVCSINCVFPKADK

SEQ ID NO: 1221 - DNA, 2670 bp, Arabidopsis thaliana
  CDS (1)..(2670)
atggattcaaactcgaatcccgagtcaaagctcaaatcattcatccttcaaatcagtagtttcagcgagagttggaatccgtatttaggtttcgatccagaatgggattctatatctaagatgatatcaactattactcaaacaatctctctggtcagctcaattgatttcgattcccagccggagtcgaagctcatgtcactcactaatgaagcagtctatgtcttcaactctatggatttggattcccagccagatccgttaatgaagcttatatctctcatttctcaaaaggtctcactcgtcaactctacggatcttatttcggagcaggacacggattcagcgccagacttggagattttcatgttactcattcaagaatcatttagtctaacaccggagccagagcttatatcactcatcaatcaaataatttcccacgtcgtctttcggcagcgacagtcggagtcaatgcctgatttggaggcggagctagagccggagccagattcagagccagagtcggagccggagattgatctggagatgaatctcatatctctcattactcaactaatctctcaacctataactttatctctgaagatatatctcattcctcaaataatctcaatggtcagtaaaatggattttgatttgcagccggagacggaatttgtgtcgctcactaatcaagcagtctcgctcttcaagtctatggatttggattcccagccggatccgttaaggaatctcatatctctcatttctgaagaaattactcatgccaaatctatccgcgttttgaagcggaaccaggacctgaaattgaaattagggcgaacgacactcgagccaatgatactcgcacgacatttcaatcctgaaacagattcgggaacaaagtttttgtggcggaattcgaactcgagcacagattctgacacaaagcttttggagctggattcgaactcggacagatatgtgcacataaagcctttggagccggattcaaactcggacacagatttggacctctattgtaaaacaatgagtctcgattcctatcttatgtctctcgttggtgaaacattgagactcgagcccgagccgaagttcatatcactcatctatcaaatattctcactcgtcatctctatgaattcagtgtggaagaggcttatttttctataccctcaagtacaagtaaaattggaaaaagggaaatttcatgtcattgaagaagtctcgtggagcagcaagggcaagtggaagtgtctccctctagactggaagagaatccggataacagaagaaggcctttgccatattcactgtcaaacttgcaatgtcgacaaccatggggaatatgaaaaggctccagttatgatcaaacacgctcttcatccaaaccattctctccaacttgtcttgttgaatggggacacaaccagggaatcttgcgattatgctatgaatattgcttgtgtagagaaaccaagagtcttgtctttggaccaaccaaagtggcatgagcatacacttactcaatttccaagaaagacttctgtaacttgcaacgtttgttccttggcatattcaagctgtcctttttatatatgtcccccttgcgactttgtggttcaccaaaagtgtctcagcttaccacgtgtcataaggatatctcgccatttccatcgtatctattttactctttcttttgaccaaggagttcgatgttgtggtgtttgtcgtagaaagatcgacaatgattatgggggttattcttgcaaaaaggatggttgttcgtatgtagcacattcaaaatgtgccacacagagcaatgtgtgggatggtaaagaacttgagggtgagccagaagaagacatcaatgaaattgagccgtttgtgacgctaagagatggaagcatacgacatttcagtcatgaacatcatcgtttgaaacttgatgagaacacgagtagagattacaacgagaataagttgtgccaagcatgcatcactccgatatattttggtaacgtctactcatgtatgcaatgtgatttcagtcttcacgaagaatgtgcaaaactgtctcgcaaaacacatcacccagtacatccacatctacttactctagtgggaaaatctgacattatggatgctacgaaatcatgttcagtttgtccttggaagtgcacaactggtttcttctatgagtgcagggaaagagaatgtcgttttaaggtacacgtgcagtgtgccacaatttatgagccattagtccatgaaagtcatatggatcctttgttcttaacatcgaaaccaggagaggaaagaagatgttgtgtttgcaaagagttaggacattgttccacaaatgaaacattcaattgcattgagtgcgactttgctttgtgtttcaagtgtgctactttacctcataaggtgaggtataagcatgataagcatatgcttactctttcttatggagaggaaacaagtaccataccaaattggtgtgaagtttgcgagaaaaaaataaaatcaaaggagcggttttatatgtgtgatgagtattgttgtgtcacccttcacatagaatgtatgcttggagtggacttattatatgaagcctggttcattttggttctaccgcagtag

SEQ ID NO: 1222 - protein, 889 aa, Arabidopsis thaliana
MDSNSNPESKLKSFILQISSFSESWNPYLGFDPEWDSISKMISTITQTISLVSSIDFDSQPESKLMSLTNEAVYVFNSMDLDSQPDPLMKLISLISQKVSLVNSTDLISEQDTDSAPDLEIFMLLIQESFSLTPEPELISLINQIISHVVFRQRQSESMPDLEAELEPEPDSEPESEPEIDLEMNLISLITQLISQPITLSLKIYLIPQIISMVSKMDFDLQPETEFVSLTNQAVSLFKSMDLDSQPDPLRNLISLISEEITHAKSIRVLKRNQDLKLKLGRTTLEPMILARHFNPETDSGTKFLWRNSNSSTDSDTKLLELDSNSDRYVHIKPLEPDSNSDTDLDLYCKTMSLDSYLMSLVGETLRLEPEPKFISLIYQIFSLVISMNSVWKRLIFLYPQVQVKLEKGKFHVIEEVSWSSKGKWKCLPLDWKRIRITEEGLCHIHCQTCNVDNHGEYEKAPVMIKHALHPNHSLQLVLLNGDTTRESCDYAMNIACVEKPRVLSLDQPKWHEHTLTQFPRKTSVTCNVCSLAYSSCPFYICPPCDFVVHQKCLSLPRVIRISRHFHRIYFTLSFDQGVRCCGVCRRKIDNDYGGYSCKKDGCSYVAHSKCATQSNVWDGKELEGEPEEDINEIEPFVTLRDGSIRHFSHEHHRLKLDENTSRDYNENKLCQACITPIYFGNVYSCMQCDFSLHEECAKLSRKTHHPVHPHLLTLVGKSDIMDATKSCSVCPWKCTTGFFYECRERECRFKVHVQCATIYEPLVHESHMDPLFLTSKPGEERRCCVCKELGHCSTNETFNCIECDFALCFKCATLPHKVRYKHDKHMLTLSYGEETSTIPNWCEVCEKKIKSKERFYMCDEYCCVTLHIECMLGVDLLYEAWFILVLPQ

SEQ ID NO: 1223 - DNA, 3051 bp, Arabidopsis thaliana
  CDS (1)..(3051)
atggattccgagtcggagctcatgatatctcttatttctcaactgttatctatcttaggcggtggggaagacacacatacaccacagctgaagtcaaagttgatagcacttacttgtcaactaatctctctggtcaactctctggatttggattcgcagccggagccggagtcgaagctcaaatcactaattaagcagataatttatgtcagcaactctgtttcagaaccaggaccagagtcgcagtcggtatcagtggtgactaaaatgatctctatcatcggctctatagattttgatctcaaggagtcagagccggagctcatgtcactcacttctcaaatattcgctctcatcatggcaatggacgaggaatcggagctcttttcactcctttctgaggtggccagtctcgtccagacggaggaacagaagctcatcaataaccaacaagtgccgcctctcaccaccgaagaagaagaaaaagatgatcttatctacggctatacagatgatatgaattgggagtcggagctcatgttctatatcatttctaaaatgatatctacattaagaggtgaggatatgtgtcaagaggtggcaagagatttcatagcatacgctaatcaacttattcctctcatcgaatcactggatatggattcgaattcagagccgaagcaggagccgaagatcacatcactcgttaggcaaataatctctctcagcaaggttgtttctggaccagagtcacagttggtatcactcgtgactcgaattatctctatcaccagctctacagacttggatcccacggagtcacaatggaggctcacgtcagtcacttataaaatatctcgtatcctcaaggaaataaaggattcggaggattcggagatggcatcactcattaatcaaatacacgacctcgttgacgcagaggagggacgaaagccagagtcaaggctcatatcaagcatcactcaactaatgtctcacatcaactcttggagtttttattcaggaatggaccccaagatcatatctctcattattcgaatcatctatctggtcagatcaatggatttggattcgcagacaaagcccaagtcggagctaatgtcactcgttactcaaactatcgctgtctacaactctatggatttggattctcagccgcggccgctaaggaaggtcgtatcagttttttctcagtatggttttgacgtaaattctacagtttcggattcagaatcggattcaagtgagaattacgtgtcacacattaaagattcattaaaacttgagccggagcccgagcttatttccttcatccatcgaataggctccctcgtcatctctatgaatccaaactgggagaagcttatttccttttgccctcaatttgaagtaatactgagcgatgatggaaagtttcaagtggaagaaggacgtctaagcaaaaatcagttatccgacgatatcccaatgaagtggaattgtctccaggtaaactggaatttattgaagttacatgcaggagaaaaagactttactcattttcgctgtcgaggttgcaatggtgacaaccataaagaaaatgaaaaggctccacttgaagtcaaacaccctcttcatcctaaacatcctcttcagcttgttttgtcgcaatcttctggtggtagaacgagggaatgctattgttgtgatgaagatttgctgcatatattctattgttgcttggcttgcaatttttctatgaatgtagcttgtactaagaagccagctgtcttatatagaaaccatccgaggtggcacgagcatacacttgctctgtttccaaggcaggcttccttaacttgcaacctttgtgccttggccgattcaagctccccgatctatatgtgtcccccttgcgactttgtcgtccatcttagatgtaccggcttaccacgtgtcataaagatatcccgccatctccaccgtatatcatttacattttcttttgaccgaggagatttgtcttgtagtgtttgtcgcagaaaaatagacgaagattacgggggctatacttgcatcaaggacggctgttcgtatgcggctcattcgaaatgtgcaacacaaaaaaatgtgtgggatggcatcgaacttgagggagagcctgaagaagttgaagaagaagtagttgacccgtttgtgacaataagcgacggagtcatacaacatttcggtcacccacaacatcatttgagacttgacgagaacacgagcagagattacgacgaggataagttgtgtcaagcttgcgtcatgccaatctattttggtaacttctactcctgtacgcaatgcaattatatactccacgaagcatgtgccaatttctctcgcaaaatgcatcatccggtacatccacatgtgctcactttagtgaactctgacggtgctatcaacgttagaaaagaatgtgcagcttgtccttggatgtgcacaactggtttcttctatgaatgcagtaaagaagattttcagctacatgtgcagtgcgccaacctgtctgagccactagtccatgaaagtcatatgcatcctttattcctaacatccaaaccaggagagaggagattatgttccgcttgcaaagagtcgtattttagtgtgacaagagaaacattcaactgcatagagtgtgattttgctttgtgctttagatgtgctactttacctcaaaaggtgaggtataagcacgacaaacatatgctcactctttcgtatggggaagaaacaagtaccatgacatattggtgtgaagtttgcgagagaaatttaaatccaaaggagcgattttataagtgtgatgagtactgctctatcacgctacacattgaatgtatgttgggggtggctttatacatcaggcctggttcatcgtggatctgcttcaacaataaaaagattttgatcaaaatgaaagccaaaaaagtggcctatacagggatcgaacctgtgaccttcgcgttattagcacgacgctctaaccaactgagctaa

SEQ ID NO: 1224 - protein, 1016 aa, Arabidopsis thaliana
MDSESELMISLISQLLSILGGGEDTHTPQLKSKLIALTCQLISLVNSLDLDSQPEPESKLKSLIKQIIYVSNSVSEPGPESQSVSVVTKMISIIGSIDFDLKESEPELMSLTSQIFALIMAMDEESELFSLLSEVASLVQTEEQKLINNQQVPPLTTEEEEKDDLIYGYTDDMNWESELMFYIISKMISTLRGEDMCQEVARDFIAYANQLIPLIESLDMDSNSEPKQEPKITSLVRQIISLSKVVSGPESQLVSLVTRIISITSSTDLDPTESQWRLTSVTYKISRILKEIKDSEDSEMASLINQIHDLVDAEEGRKPESRLISSITQLMSHINSWSFYSGMDPKIISLIIRIIYLVRSMDLDSQTKPKSELMSLVTQTIAVYNSMDLDSQPRPLRKVVSVFSQYGFDVNSTVSDSESDSSENYVSHIKDSLKLEPEPELISFIHRIGSLVISMNPNWEKLISFCPQFEVILSDDGKFQVEEGRLSKNQLSDDIPMKWNCLQVNWNLLKLHAGEKDFTHFRCRGCNGDNHKENEKAPLEVKHPLHPKHPLQLVLSQSSGGRTRECYCCDEDLLHIFYCCLACNFSMNVACTKKPAVLYRNHPRWHEHTLALFPRQASLTCNLCALADSSSPIYMCPPCDFVVHLRCTGLPRVIKISRHLHRISFTFSFDRGDLSCSVCRRKIDEDYGGYTCIKDGCSYAAHSKCATQKNVWDGIELEGEPEEVEEEVVDPFVTISDGVIQHFGHPQHHLRLDENTSRDYDEDKLCQACVMPIYFGNFYSCTQCNYILHEACANFSRKMHHPVHPHVLTLVNSDGAINVRKECAACPWMCTTGFFYECSKEDFQLHVQCANLSEPLVHESHMHPLFLTSKPGERRLCSACKESYFSVTRETFNCIECDFALCFRCATLPQKVRYKHDKHMLTLSYGEETSTMTYWCEVCERNLNPKERFYKCDEYCSITLHIECMLGVALYIRPGSSWICFNNKKILIKMKAKKVAYTGIEPVTFALLARRSNQLS

SEQ ID NO: 1225 - DNA, 1896 bp, Arabidopsis thaliana
  CDS (1)..(1896)
atgaacccagtcggtgaatttcgtgaggaagaaattgatggaaaaacgtttttcttatacaattcttcaacctcctccggtgaagacatccctctccaacctcttttcctttgtcctctcttacgtgtcaaaactcacagccaaaaagatccggaggctaattatgatgaccaaggctttgtcctgttcgatatttcccctcacttcccaagcgctgatccacaagtccactatatgcttgattctcacaaccgcggtcttatctgtaagctccctgttctccctctcttttggtgcaacaataaagaacctaatggtgccgacttctgttgtagtgcatgcaaaatcacaaatcttggcacagcctactatttttgtaccacatgtcgtaaaaagttccacaaagaatgtgtggagtctccacttgaaatcaaacatccttcctatccttttcaatctctccaactttatagttctccctttgcccttgtgaattgcatttgttgtgatataagtttccaagacatgatttatcattcttctacttacaaactgagtatgcatcctgtttgtgcgatgaaaccagtaccctcttttatagaccacacaaaaagacatccccaccctctcactttttcccctagcaaagctttcttaccttgcaatgtttgcggcctgattaaagaatctattctcacctatgtttgtgttccatgtgactttgtagtccatcaagattgtatctatttcccgcatatcataaaaatttctcgtcaccaccaccgtatcatttttacctcttctcttccatctgcaaaatggtcttgcggagtctgtcgtggagaggttgacaatcattatggtgcctactcttgcaacaagtgtggtgattattttgttcatacaagatgtgcattgagaaaagacgtgtggaatggagaagatctcgagggaataccggaagagcctgagatggatgttgagccatacgagacgataaccgatgcaattatactccatttttctcatgaccatcatctaaaactcgagatcaatagagtttacgatgaaaacaagttttgtcaagcgtgcatccttccaatctatgagggtacttactattcatgtatggatacatgtgacttcattctacacgaagcatgcgctaatgcccctcgaaagaaacaccatccgttgcatcctcacccgcttacgcttaaggtcgtcagtattggatacgatcattacagaagaagagggaattacttcgaatgtcgtgcttgtaggcgtcaaagttgtggttttgtttatgatagtctgggtttctcacttgatttgcgctgtgcctcggttttcgaaccatttgaatatcaaggccacgagaatcccttattcctagccttagagccagatgaagaaaaagcggtgatatgtcaaatctgccaagaagatggtgatggaaataactatattagaaaactaaattgcatggaatgcaagtacattatatgtttcaggtgtgctaccttgccatacaaggcaaagtacaagcatgacaaacatttcctcacatttcgggaagggaaagagggaagtgatcaattagactggtgtgaggtatgcgaaaagaagttagtatactcaagaaaaggtgggttctatgcgtgtgatgactgctgcgccactctccatgttaatcgtttgcttgggagagatgagtatatgctgaaacctggtcatactgtaatgaattataggtcaaacattcatattcttcccaacaataccatgactcgaccattctgccatggtcataaagaagatcgttgtccacacaaagtagttttcaaatggcatgacatgacattttgctcttacagttgttcgatgcattag

SEQ ID NO: 1226 - protein, 631 aa, Arabidopsis thaliana
MNPVGEFREEEIDGKTFFLYNSSTSSGEDIPLQPLFLCPLLRVKTHSQKDPEANYDDQGFVLFDISPHFPSADPQVHYMLDSHNRGLICKLPVLPLFWCNNKEPNGADFCCSACKITNLGTAYYFCTTCRKKFHKECVESPLEIKHPSYPFQSLQLYSSPFALVNCICCDISFQDMIYHSSTYKLSMHPVCAMKPVPSFIDHTKRHPHPLTFSPSKAFLPCNVCGLIKESILTYVCVPCDFVVHQDCIYFPHIIKISRHHHRIIFTSSLPSAKWSCGVCRGEVDNHYGAYSCNKCGDYFVHTRCALRKDVWNGEDLEGIPEEPEMDVEPYETITDAIILHFSHDHHLKLEINRVYDENKFCQACILPIYEGTYYSCMDTCDFILHEACANAPRKKHHPLHPHPLTLKVVSIGYDHYRRRGNYFECRACRRQSCGFVYDSLGFSLDLRCASVFEPFEYQGHENPLFLALEPDEEKAVICQICQEDGDGNNYIRKLNCMECKYIICFRCATLPYKAKYKHDKHFLTFREGKEGSDQLDWCEVCEKKLVYSRKGGFYACDDCCATLHVNRLLGRDEYMLKPGHTVMNYRSNIHILPNNTMTRPFCHGHKEDRCPHKVVFKWHDMTFCSYSCSMH

SEQ ID NO: 1227 - DNA, 1956 bp, Arabidopsis thaliana
  CDS (1)..(1956)
atgaattcaaatttagtgggtgtatttcgtgagagggaaatcgatgggaaaccattccacacatacactttatcatctcaaacagacaccacaactccttcttcctacggtgaaacagccattgatggcgacgaccacctctctcttcaacaacctcttttcctctgtccttctttacgtcttagagtttacggggaaaacaattcttatactgaatttctcccgtacaatacttcccctcacttccccagcataacaggcgttgatcaacaagtccagcatttgcttgattccgacagccaacaagtccatgatttgcttcattccgacaacagccatgatgatgatggtgatgaaatctgtaagctccctgttgtccctatctattggtgtaacagtaaaaaagatgagtatttacaattcacttgcggtgcatgtcaactatcgaaaattggcacagactattatatctgtctcagatctgatcaaatgttccacaaagaatgcgtggagtctccgcttgagatcaaacacccttcctatccctttctttccctcaaactttaccataattttagcgaaaacgtgaattgcatctgctgtgatttagctctctttagcatgctttatcattcttccacctacaaacttagtatgcatcctgtttgtgcgatgaagccaatacccattttaatagaccacccaaaaaggcacccccaccttctcacctttttccctaaacaagcttccttactttgcgatgtttgtggcctcgttaaagaatcttttcccacctatgtttgtgttcgatgtatctttgtagcccatcgagattgtatttatttcccgtacgtcattaaaatatgccgtcaccaacaccgtatttcttttatctcttctcttccatccggcaaatggtcttgcggagtctgtcgtcaaaaggttaacaacaattgtggtgcgtacacctgtaacaagtgtagacactattttgttcatacaagatgtgcgttgcgggaagacgtgtggaatggaaaggatctcgagggagtacctgaagaacctgaaataattctcgagccatttgagacaatagctgatggaataatacttcatttttctcatggccatcatctcaaactcgagaacagtagagtttacgacgaaaacattatttgtcaagcgtgcatccttccaatctatgagggtaattattattcgtgtatggatcaatgcgatttcgtcctccatgaggcatgtgcaaatgcttctcgcaagaaagatcatgccttgcacggtcacccacttacgctaaaagtccaaggtgaagattcctttttctgttctgcttgttgtcgtcaaagttgtggctacgcctatggagttggatcttaccaaatagacttccggtgtgcctcggtttctgaaccatttgaatatcaaggccatgaacatcctttattcctagctttagaccgacaacaagaacgtaaggcaacttgtcaaatctgccaacggaaaattgcttttcttcgaaaactaaattgcatcgaatgtgattatgttctatgttttatttgtgctactttaccatacgaggcaaagtataagcacgacaaacatttcctcacattccgagaagggaaaaaaggaagtgatcaattagactggtgtgaggtctgcgaaagaaacatagtatactcaagaaaagatggcttctatgcgtgtgatgactgctgcaccactcttcatgttcgttgtttgcttggagaagacatgtatatgtcgaaacctggtcacaccataatgaataataagagggaggttcatattcttcccaacaatacccggtctcgaccattctgccatcatcatgatgaagaccgttgtccatacaaagtaattttcaaatggcaggacatgacattttgttcttaccgttgtttgataaagtaa

SEQ ID NO: 1228 - protein, 651 aa, Arabidopsis thaliana
MNSNLVGVFREREIDGKPFHTYTLSSQTDTTTPSSYGETAIDGDDHLSLQQPLFLCPSLRLRVYGENNSYTEFLPYNTSPHFPSITGVDQQVQHLLDSDSQQVHDLLHSDNSHDDDGDEICKLPVVPIYWCNSKKDEYLQFTCGACQLSKIGTDYYICLRSDQMFHKECVESPLEIKHPSYPFLSLKLYHNFSENVNCICCDLALFSMLYHSSTYKLSMHPVCAMKPIPILIDHPKRHPHLLTFFPKQASLLCDVCGLVKESFPTYVCVRCIFVAHRDCIYFPYVIKICRHQHRISFISSLPSGKWSCGVCRQKVNNNCGAYTCNKCRHYFVHTRCALREDVWNGKDLEGVPEEPEIILEPFETIADGIILHFSHGHHLKLENSRVYDENIICQACILPIYEGNYYSCMDQCDFVLHEACANASRKKDHALHGHPLTLKVQGEDSFFCSACCRQSCGYAYGVGSYQIDFRCASVSEPFEYQGHEHPLFLALDRQQERKATCQICQRKIAFLRKLNCIECDYVLCFICATLPYEAKYKHDKHFLTFREGKKGSDQLDWCEVCERNIVYSRKDGFYACDDCCTTLHVRCLLGEDMYMSKPGHTIMNNKREVHILPNNTRSRPFCHHHDEDRCPYKVIFKWQDMTFCSYRCLIK

SEQ ID NO: 1229 - DNA, 1029 bp, Arabidopsis thaliana
  CDS (1)..(1029)
atgtattcaaattcagtgggtgagtttcgtgagggagaaatcgatggaaaaccatttctcatatacactttgttatctcaaacagagagcccttcttccggtgaagcagcggttgattccgatggtggggacggccgcctctctcttgagcctcggatcctctgtcctactttacgtctcaaagttaaaaagttgaaaccatacacgagagattcaaatcgtagctttttcccgatggttgtttcccctcacttccctaccatacaaagcggtcatgaacaacccgagtatatgcttcattccgacagctttcatcaagattgtatctatttcccgtatgtcataaaaatatcccgtcaccaccaccgtatatcttatacctcctctcttccatccggaaaatggtcttgcggagtctgtcgtcaaatggttgacaacgactatggtgcctactcttgcaacaagtgtgatgactattttgttcattcaagatgcgcgctgcggagtgacttatgggatgggatagaactcgagggagtacctgaagaacctgagattgttgttgagccatttatcacgatttctgatggtataatactccatttttctcatggccatcatctgaaactcaagatcagtagagtctacgacgaaaaaaaggtttgtcaagcgtgcatccttccgatctatgagggtagctattattcatgtatggatgaatgtgacttcatccttcacgaagcatgtgcaaatgcaccttgcaagaaacatcatgctttgcgtcctcacccacttacactaacggtcatcactagtgaatatgaaggcaacgtaggacgtttttgttgtaatgcttgtcagcgtgaaagttgtggtttcgtctacgaggatctcggagcaaagattggtgtgctaccttaccatacaaggcaaggtatcaacatgacaagcatttcctcaaattttatgagacgaaagaggcaaatgatcattcagagtggtgtgatgcatgcgaaggaagaatattag

SEQ ID NO: 1230 - protein, 342 aa, Arabidopsis thaliana
MYSNSVGEFREGEIDGKPFLIYTLLSQTESPSSGEAAVDSDGGDGRLSLEPRILCPTLRLKVKKLKPYTRDSNRSFFPMVVSPHFPTIQSGHEQPEYMLHSDSFHQDCIYFPYVIKISRHHHRISYTSSLPSGKWSCGVCRQMVDNDYGAYSCNKCDDYFVHSRCALRSDLWDGIELEGVPEEPEIVVEPFITISDGIILHFSHGHHLKLKISRVYDEKKVCQACILPIYEGSYYSCMDECDFILHEACANAPCKKHHALRPHPLTLTVITSEYEGNVGRFCCNACQRESCGFVYEDLGAKIGVLPYHTRQGINMTSISSNFMRRKRQMIIQSGVMHAKEEY

SEQ ID NO: 1231 - DNA, 1800 bp, Arabidopsis thaliana
  CDS (1)..(1800)
atggaagagcctaagaatatacatcctgctgctttatatacaaaaggatgtcgtttggctcatccgactcatcctcacaccctttcccctaaactcagcaaaaacactaagtccaattgctttacatgcgggaagcaagtatccacttcttctcggggtttccattaccactgcaccatctgcgatgtggatttccacgaagaatgtgttaatattcctagaaaaatattacatccttttcacctccaacatcctctctttttaacctatggaaagcatgacaatatcatcgacggcagcaatatgagcgaacaaggcccttatgaagaccaaggcacatcggatcctggtaagtctggatggggtaacatatttgataactgcacttggtgtgggaaatacataccaacaccaagttcacatccaagaatgacagttttctatcggtgttctatttgtaacttttgtttggatactatgtgcacacaaaccaaaccccctcttactattgaaaacccaaaaggccatcaccattcactcgtccttttccctcgtccactcttagttccttgtgatgcttgtggtttggtcaatgcgtcggaagcaagttatgcttgtttccaatgtaattatgtggtacatcaatattgtgttgatttaccacgcgtcataaagatcacacgtcatcctcatcgtctctctttttctccttaccttccacccccaaattcgttatgccgggtctgctacaagacagttgacattaaatatggtcaatattcttgtaaagacgaggattgctcttacgtacttcataccaaatgtgcaacacatgtaatggtatgggatggaaaagaactcgaatgggaacccgaagaacctggtgtaattgaagatattgcaccattcaagaatgtaggtgatggtttgatagaacattttagtcatgaacatcatctaaagctggagaagtatgatagtgtacgagacgcaaggaagcagtgcgaggcgtgtgtccttcctatccacttgcatgatttctacaaatgtatgcaatgtgacttttttctccacgtagtgtgtgcttgtctacctaagaaagtggatcatgcattgcataatcattctatcatcctcgacccatctcctctacccactgatggtaatctgcaatgttcagcttgttctcgaacgtccactggtttcaagtataagtgcgctgaaaagaactgcaagattcattggtttaagatagatgtcccttgctttttagttcctgagtatagcattgacaaagtccatgaacatcctctattcatcgctccattcaattacgactatgaaccttttcgctgcaatggttgtaagagaggtcttaccaagaatcgtctacaatgtagtactctttgcgagtactctatttgttatgaatgcgctacgattccaagtgagttacactataaatacgataaacatcctctcactctttgctatggagaagacacggacgacaagtattggtgtgaagaatgcgaaaaggaagtgaatacgtcagaatggttctacacgtgcaacgaatgttgcaccactattcatcggaattgcttattcggattccacgtttatctgaagcctggtaacactttcaaatatcataatcgaagaatggtggaagttcttgacaacaagagcagcacccgaccggtttgcagccgttgtgaggatcgctgtcagggttccatttacttcaaagtcgatgtgaggaatgtttgtgcttcgtgtcttttaaaatgtttatag

SEQ ID NO: 1232 - protein, 599 aa, Arabidopsis thaliana
MEEPKNIHPAALYTKGCRLAHPTHPHTLSPKLSKNTKSNCFTCGKQVSTSSRGFHYHCTICDVDFHEECVNIPRKILHPFHLQHPLFLTYGKHDNIIDGSNMSEQGPYEDQGTSDPGKSGWGNIFDNCTWCGKYIPTPSSHPRMTVFYRCSICNFCLDTMCTQTKPPLTIENPKGHHHSLVLFPRPLLVPCDACGLVNASEASYACFQCNYVVHQYCVDLPRVIKITRHPHRLSFSPYLPPPNSLCRVCYKTVDIKYGQYSCKDEDCSYVLHTKCATHVMVWDGKELEWEPEEPGVIEDIAPFKNVGDGLIEHFSHEHHLKLEKYDSVRDARKQCEACVLPIHLHDFYKCMQCDFFLHVVCACLPKKVDHALHNHSIILDPSPLPTDGNLQCSACSRTSTGFKYKCAEKNCKIHWFKIDVPCFLVPEYSIDKVHEHPLFIAPFNYDYEPFRCNGCKRGLTKNRLQCSTLCEYSICYECATIPSELHYKYDKHPLTLCYGEDTDDKYWCEECEKEVNTSEWFYTCNECCTTIHRNCLFGFHVYLKPGNTFKYHNRRMVEVLDNKSSTRPVCSRCEDRCQGSIYFKVDVRNVCASCLLKCL

SEQ ID NO: 1233 - DNA, 1671 bp, Arabidopsis thaliana
  CDS (1)..(1671)
atgggagagatagacaaaatccgtgacgggtttcttggtgcagttaaattggcagttcatcgtcattttttgttccctacaaacatttcctctaaatgcagagtgtgttccatagagagacttgaacccaccaaagtcttgacttgtaatcaatgcgagttttctcttcatgaagactgcattgagatcaccagcccttctcatcataagcatcctcttaagctgcatgaacgtatcataggttaccgtagacgggaccaatgttgtctttgtagatacaagttattggatatgttctacaattgttcacgttgtatgttcgaggtgtgtatggcttgtctgaagaggccattacttatctacaagacaacatcccacaagcacccgctttcccttatgcccatcgattctgtctccttcacttgcgatgcttgcggctctgtagataattcctcatatccttgcacatgtcttcaatgttgcttcatcattcatagagattgcattgatttacctagtgttataagtattaatcgtcatgatcaccgtatttctcatgtcgatattcttagaccggaggagtggatatgcggagtttgccataaaattatcaataaccaatatggagcgtattcttgctcggtttgtcattatgcagtccattccaagtgcgcaataagggatgatgtatgggatgggaaagaacttgatggaatacctgaagaagagggagataacaaaaccgaggatataacgccatttgaggtgattgatgacaaagttataaaacactttagtcatgaacatatattaagatttatttatcaagatgttcttattcgcgacgaaaaccaaagatgctacgcatgcgttcttccattctactacgatgcatgctatatatgcacgcattgtgatttcattcttcatgaaacatgcgctaatcttccgcggacaaaaaggcatgagttacacaagaatcactttactctttacccgaatcctaaacctggagaagatctcgagctttccaaaagctttttcacatgtgttgcttgtcaaagaccaagcaacgggtttaggtacgagagcggaaatgtaaagttggatgttcgttgtgctacaatctcagacgagtttaaccatgatagtcatttgcattccttatttatcctctcactttttcctcgggagtgctcggcgtgtgaccaaatggtgtacggctcactgagttgtgttaaacttgatttctttttgtgcttcaaatgtgctactttaccaaaagaggtcttcaacaagaacgacaaacatcctctctatctacgatacagtggatatcgctacggtaattattggtgtgagatatgcgaaaaaccaaccgatccaaggaagtggttttactcatgtgacaaatgttgttcgactcttcatatcgactgcgtactcggtaaatcaccttacatgaggccagggcacagttttcttttatgtagtcgtgagttccaagtggtttccaataaccatacatctcgaccgttttgtactatatgttcgttgcgatgcaaagatgcttttgttctgaagagcaaggatgagactgatacatcatgcctatgttctcttaaatgtctcgattctcttgtgatgagtatgcaacgtattaaactgtaa

SEQ ID NO: 1234 - protein, 556 aa, Arabidopsis thaliana
MGEIDKIRDGFLGAVKLAVHRHFLFPTNISSKCRVCSIERLEPTKVLTCNQCEFSLHEDCIEITSPSHHKHPLKLHERIIGYRRRDQCCLCRYKLLDMFYNCSRCMFEVCMACLKRPLLIYKTTSHKHPLSLMPIDSVSFTCDACGSVDNSSYPCTCLQCCFIIHRDCIDLPSVISINRHDHRISHVDILRPEEWICGVCHKIINNQYGAYSCSVCHYAVHSKCAIRDDVWDGKELDGIPEEEGDNKTEDITPFEVIDDKVIKHFSHEHILRFIYQDVLIRDENQRCYACVLPFYYDACYICTHCDFILHETCANLPRTKRHELHKNHFTLYPNPKPGEDLELSKSFFTCVACQRPSNGFRYESGNVKLDVRCATISDEFNHDSHLHSLFILSLFPRECSACDQMVYGSLSCVKLDFFLCFKCATLPKEVFNKNDKHPLYLRYSGYRYGNYWCEICEKPTDPRKWFYSCDKCCSTLHIDCVLGKSPYMRPGHSFLLCSREFQVVSNNHTSRPFCTICSLRCKDAFVLKSKDETDTSCLCSLKCLDSLVMSMQRIKL

SEQ ID NO: 1235 - DNA, 1878 bp, Arabidopsis thaliana
  CDS (1)..(1878)
atggatttggattcgatgccgaagccggagtcggagctcatgtcagtcacaagtcaaataatctctgtcttcaactcaatggatctgaattcccagccggaggcactgtccaaggtcatatcactcattactgatcgcgtgaatgatacagattcggattccgatatctatttggattcagattttgaagactatattgcggttatattgaatctcgagccggagccggagctcctatcactcatctatcaagtattcaccctcgtcagctctatgaattcaaagtgggagaagcttatttctgtacgccctcaagtagtacacagattgggaagagacaaaatttatatgaatgatgaacaagtctcgtgtagaaggtataacaagtgggcgtgtctccctaaaaactggtttatgttgtggtttatgggagaagacgacgaaacgcactttctttgcagagcttgcgaaggccagaaccataaagaacataacaacgctccagttgagatcaaacaccatcttcatcccaagcactcacttctgcttgtcaatattgaaatatatcctagagagaggaaatgctattgttgcgacgaagatctcggaactttcttttatcattgctcggcttgcgatttcactctgaatatagcttgtgtggagaaaccaccggtcttatctatagaccatcccaagtggcatgagcatacacttgttctgttttcgagaacaacttccttaacttgcgacgtctgtgccttggcctattcaacatctcctttctatatatgtccaccttgtggctttgtggtccatggaagatgcatagacttaccacgtgtcataaggatctcccgccatccccatcgtatctcttttaccccttcttttcatcaaggaaattggttttgtggtgtttgtcgcagaaagattgaaaatgatttcgggggttattcttgcgttaagtacggttgttcgtatgcggcacattcaaggtgtgccacacaaagcaatgtgtgggatggtgtagaacttgagggagagccagaagaagacattgaagaaattccgccatttgtgaggataagtgatggaatcatacaacatttcattcatcagtatcatcacttgcgacttgatgagaatacatgtagagaatacgacgaggataggctgtgtcaagcgtgcatcacgccaatctattttggcaacttgtactcttgtatgcaatgtggttttgttctccacgaaaaatgtgcagaactttctcgcaaaatacatcatccgatacatccacatatgctcagttttgtagcaagaggcaacggcgttagacgttgctgttcagcttgtccttggttaatcacaactggtttcttctatcggtgtgagagagaagaatgtgatttccaactacacgtgcagtgcgccacagtttcagagccattagtccatgaaagtcatatgcatcctttattcctgacatccaaaccaggagagtggaaagattgtagtgtctgcaaagagtcaaattattctttgacaaatgaaaaatttaattgcattgaggagtgtgactttgctttgtgttttggatgtgccacattacctcaaaaggtgaggtataagtatgataagcatatgctcactctttcttatgggaaggagacaagtaccatgacctattggtgtgaagcttgcgagggagaaatagatccaaagaaaaggttttatatgtgtgatgagtattgttgtgtcaccctacacattaactgtatgcttggggcggacaaatacatggatcccggttcatggtggttatacaaaggcaaccttgatggaacttgctctggttgtatgaaatactattattga

SEQ ID NO: 1236 - protein, 625 aa, Arabidopsis thaliana
MDLDSMPKPESELMSVTSQIISVFNSMDLNSQPEALSKVISLITDRVNDTDSDSDIYLDSDFEDYIAVILNLEPEPELLSLIYQVFTLVSSMNSKWEKLISVRPQVVHRLGRDKIYMNDEQVSCRRYNKWACLPKNWFMLWFMGEDDETHFLCRACEGQNHKEHNNAPVEIKHHLHPKHSLLLVNIEIYPRERKCYCCDEDLGTFFYHCSACDFTLNIACVEKPPVLSIDHPKWHEHTLVLFSRTTSLTCDVCALAYSTSPFYICPPCGFVVHGRCIDLPRVIRISRHPHRISFTPSFHQGNWFCGVCRRKIENDFGGYSCVKYGCSYAAHSRCATQSNVWDGVELEGEPEEDIEEIPPFVRISDGIIQHFIHQYHHLRLDENTCREYDEDRLCQACITPIYFGNLYSCMQCGFVLHEKCAELSRKIHHPIHPHMLSFVARGNGVRRCCSACPWLITTGFFYRCEREECDFQLHVQCATVSEPLVHESHMHPLFLTSKPGEWKDCSVCKESNYSLTNEKFNCIEECDFALCFGCATLPQKVRYKYDKHMLTLSYGKETSTMTYWCEACEGEIDPKKRFYMCDEYCCVTLHINCMLGADKYMDPGSWWLYKGNLDGTCSGCMKYYY

SEQ ID NO: 1237 - DNA, 1959 bp, Arabidopsis thaliana
  CDS (1)..(1959)
atggaaaaaatagagctaccaattcacaaacatcctttgttacctataactcgttttttctctcgtcacggttgtaacgggtgtggctctgatggttacatttacggaggctaccattgcaatgagttaggctgtgagactcctgcgtttcatagagagtgtgctgagtctttacaggaaataaagcacttctctcaccccgatcatcctcttaatctgcgcctaaatgacaaagcatctacatgtaatcgatgtggaattcatctgcttcgaaaaacctatatctatgtatgttcaatctgtgacttcaagttggatttacattgtgcgaaggatgctgctccacttcctattcttgaaaactacaatctccacgagcatccacttaagctcttcgatgtatcgaaatctctcaagcgagtgagactgagagagtgcaagacgtgtgactctccatttctcattgagaaactatgttatatatgttatcaatgtaaaatactcttccatgcgagctgtgccgagtttttcccagaagcaaaccacacttcccaccctcaacacccactcaagctccttaaatttgcggaagcacctgattacgccgacaagaagtgtcttctttgcgacgagaagtttgatcaagatcaaggtcttcaccattgtgatgtttgtaatttcagcatatgtagagcatgtatgaaaaacccaccaccggttggtgttgaaagcccgacgacccacgaacatcagcttcatcttgttccaagacgcatccatttcacttgcaatgcttgtgggacgctaggtgaacaaagcccttatttttgtcttcaatgtaatttcatgatccatcggcagtgtatcgatttaccacgtgtcataaacatcaaccgccacgatcatcgcatctcttacacaagacgcattagacatggaaaggggatatgcaaagtttgtcgtaaaatggtagatggattctatgggggttatatatgcgtcaaatgtcttagttttgctattcatgcacgatgcgcaacgagagaagatgtatgggagatggtggagctagaagggacgcctgaagaagatgaaattgggccattcgaggtgattgatgataacacaataaaacattttagccatgatcataacttacgaatcaataatgacggtgatggccaaattctacatgaaaacatagtttgtgaagcatgtgccctccagattttatcagaaccgttctacagttgtaagcaatgtaattttaaactccaccaaaaatgtgctaaccatccaaggaagaaacatcatgtgtaccgcaaccttccattcacactacttacatctggcaacgagattttccaatgttggctttgtttacaagaattcaacggtttcatgtatcaatctggccattatgttatagatgtacgatgtgctgcaatttcagatacacttgagtacaaaagccatcaacattcgttatattactattctactacatatacgcattgtagtagatgtgggaagaaggattccgtctttagatgtgacgagtgtgactatggtttgggaggcaaatgtgctatattaccgggaaaggtaatgaataataggtacgatgatcatcctctcttcttgtctttcgatgagatgaatgtggatggtgaatactggtgtgaggcatgtgaaacaaaagtgaattcaaaggaatggttctatacatgcaatgactgtgggactacattacatatttcttgcgttgttggagacttctcatatatcaagcatggttctcatctcatgaacacaaaagtggtatccaacacctctatttgtagaccattttgctttgtgtgtaactctagatgcaagctcccttccattcttaagctttccaagggcggagttaatgtatacatttgttctttcaaatgtcgtcttgaaacttattaa

SEQ ID NO: 1238 - protein, 652 aa, Arabidopsis thaliana
MEKIELPIHKHPLLPITRFFSRHGCNGCGSDGYIYGGYHCNELGCETPAFHRECAESLQEIKHFSHPDHPLNLRLNDKASTCNRCGIHLLRKTYIYVCSICDFKLDLHCAKDAAPLPILENYNLHEHPLKLFDVSKSLKRVRLRECKTCDSPFLIEKLCYICYQCKILFHASCAEFFPEANHTSHPQHPLKLLKFAEAPDYADKKCLLCDEKFDQDQGLHHCDVCNFSICRACMKNPPPVGVESPTTHEHQLHLVPRRIHFTCNACGTLGEQSPYFCLQCNFMIHRQCIDLPRVININRHDHRISYTRRIRHGKGICKVCRKMVDGFYGGYICVKCLSFAIHARCATREDVWEMVELEGTPEEDEIGPFEVIDDNTIKHFSHDHNLRINNDGDGQILHENIVCEACALQILSEPFYSCKQCNFKLHQKCANHPRKKHHVYRNLPFTLLTSGNEIFQCWLCLQEFNGFMYQSGHYVIDVRCAAISDTLEYKSHQHSLYYYSTTYTHCSRCGKKDSVFRCDECDYGLGGKCAILPGKVMNNRYDDHPLFLSFDEMNVDGEYWCEACETKVNSKEWFYTCNDCGTTLHISCVVGDFSYIKHGSHLMNTKVVSNTSICRPFCFVCNSRCKLPSILKLSKGGVNVYICSFKCRLETY

SEQ ID NO: 1239 - DNA, 1785 bp, Arabidopsis thaliana
  CDS (1)..(1785)
atggtcctagttgaggagctctctgacgtatcatcacctacaaatgaagcaaatcaagcatattcctatgatgatgatgatgatgatgatggatcattaaccccatccatggtgtttgaccagatcatgggaacttctctgatgcttccatttcacgaacatcctgtatacaaccactatagcagcactggtcaatgcgacggatgccccgaacttcgagaaaacggtctccatggctataactgcaatacttgcgggctcaccgtccacaaagaatgtgctgaatcatcaccagagattaaccatccttctcaccagagacaccctctcatgctcctaacacatggcttaccacaagaagctgaagatgacaaatgtcgtctatgtggagaaaaggttggaaaattagtttatcattgttcaatatgtgacttcagtttggatcttttttgtgctcgaaacccgctttcactagttgtttacttccggaaaggtcatgaacatacactcactctcatgccaaggctcatacgcttcacttgtaatgcatgtggtcttgaatccgatcgatctccttacatttgtgctcaatgtgattttatgatccatgaagattgtatctacttaccacgcgtcattagcatcatacgccatgaacatcgaatttctcgaacttattttcttggttctggagattggaaatgcggagtttgtagaagaagaatggatgggagatatggagcatattcttgctcgatttgtccggattatgcagttcattctagatgtgccacgaggagggatgtgtgggatggattagaacttgaggacgagccagaagatatcgaagaatgtgaagaaccgtttagagttgtgagtgatggagtaatcaatcactttagtcatcgagaacatgatctaaggcttgaagatggtcttactaatcgccatgatgaaaatattcgatgcagagcatgcgtccgtcctgtctacgctaacacattctacagttgtatgcaatgtgatgatttcattctccacgagacatgtgctaatcttcctcgaaagaagcgacatgtactacacaatcatcagcttactctataccccgatgacaacatagtcatggactttccgatgcttcgtggagtatttttatgcactgcttgtcgccgactctgtagtggtttcaggtatgaatgttgcaatatcaaattagacgtacgatgcggttccatatccgaaccatttttctacgagtgtcacccgcatcctctgttccagacttcactagatagcaaggtatgtgagacttgcaaggaagagtcagattatgttctaacttgtatggattgtgattatgttttggatttcgagtgtgctactttaccacctacggtaaggtacaaatatgatagacatcctcttaaactatgctacgatggagacaaggacatggccggtagttattggtgcgagatatgtgagaaagaaatggatcaaaatataatattctacacttgtgaaagttctggtccgactattcatatcgagtgtgtacttggagatttcaggtatgtgaagcctcgactacattttgagttcaataaaaagaaatgggaagtggctttgaatggtataaaccgaccaggatgctacaaatgtggctttcgttgcaagggaccttttgttgcagtaagtgtagactatgatattagttatgtttgttctcttttatgtttatggaaaggagaaactctcgtgtacggtagtataagagattga

SEQ ID NO: 1240 - protein, 594 aa, Arabidopsis thaliana
MVLVEELSDVSSPTNEANQAYSYDDDDDDDGSLTPSMVFDQIMGTSLMLPFHEHPVYNHYSSTGQCDGCPELRENGLHGYNCNTCGLTVHKECAESSPEINHPSHQRHPLMLLTHGLPQEAEDDKCRLCGEKVGKLVYHCSICDFSLDLFCARNPLSLVVYFRKGHEHTLTLMPRLIRFTCNACGLESDRSPYICAQCDFMIHEDCIYLPRVISIIRHEHRISRTYFLGSGDWKCGVCRRRMDGRYGAYSCSICPDYAVHSRCATRRDVWDGLELEDEPEDIEECEEPFRVVSDGVINHFSHREHDLRLEDGLTNRHDENIRCRACVRPVYANTFYSCMQCDDFILHETCANLPRKKRHVLHNHQLTLYPDDNIVMDFPMLRGVFLCTACRRLCSGFRYECCNIKLDVRCGSISEPFFYECHPHPLFQTSLDSKVCETCKEESDYVLTCMDCDYVLDFECATLPPTVRYKYDRHPLKLCYDGDKDMAGSYWCEICEKEMDQNIIFYTCESSGPTIHIECVLGDFRYVKPRLHFEFNKKKWEVALNGINRPGCYKCGFRCKGPFVAVSVDYDISYVCSLLCLWKGETLVYGSIRD

SEQ ID NO: 1241 - DNA, 2085 bp, Arabidopsis thaliana
  CDS (1)..(2085)
atggaagcaccttctccttttttttctagatctaaacccaaatgtcgtctgtccgatccggctcagccgctcaaccttttccggcttggatgctcctcgagcaaaggcaatgatatggaagacacacctcctccctttttttctacatctaaacccaaatgtcgtctgtccgatccggctcagccgcacaagctttgccggcgtggataccgttctcatcctcgactttctatgtgcttttcgtgcaaaggcaaggatatggaagacagtaggtactattactactgtgttacatgcaaattggaattccacagaggttgtcacgtctttccaccggagataaaacacatttttcacccctctcaccctctaactctcatttccgtagatccgacttttgatttttcaccccgaaactggaaagacaagtcctctacagaagaatcgatatatgaagttgatgatgattgtgaagacgacgacaacaatataatgacgataataataataatgatgatgatgatgatgatgatgatgatgatgatgataacgatgatgatgttgttgatgatgatgatgatgatgatgatgatgatgatgattgcctgtttatctgatggaaatcacctgaaatgcaaatgttgtcaggttccactacaaaaggtatattatcattgttctatctgcaagttctatcttaatgcgacttgctcgatgagaccaccacctcccactatctcacacatcaaaagtcatgagcacaccctcaccctcttccctatacgacttccttttccttgtgatgcatgtggcttgtctctaagcgagaccgatgatcttgtttacgcttgtctcccttgcagccacatggtccacagatcatgtatctatctacctcgtgtcattaagatcacccgacacccacaccgtctctctttcagtttatcccttcaacctggtgatttcttatgtggagtctgtcgccaaaccatcgacgtcaacaacgggcaatactcttgtaataagggatgtcattatgctgtccattcaaaatgtgcaacgagaaaagaggtttgggatggaaaagatcttgaaggagtgcctgaagaacccgaggaatatatggagtcatttgttaggattgatgaggagacaattcaacatttcagccatgagcattatctaaagctttatgaaaagaacaatatttgtgagaaagacaaggtatgtgaggcatgcacccttccagtaatgatctctcagagatattatggttgtatgaagtgtgattttgttctcgatgaagcatgtgcatttcttcctcgcaaaaaataccacccattacataaacacccacttacgctccacgctttcccacttggtcggatctccgggttcggtcatctgtaccactcggcaagcaacatattcatatgtgatggttgcagccgaattggttgtggttttgtgtacaaatgcggtgaacaagattgtacatttctcgtagacgtcaactgcgcttctcttccagatcctttcattcatggttgtcatccacatgatctctttttcaatttgacggaaggtaaatgcatggggtgttcaagtgattattgttcatcctattacctagaatgcattaaatgcacttcttttttgggtattagatgtgctactttgcctactaaggcacactacaaatacgataggcatccactcaccctatgctacggtgatgaagatacaacaagtggccaatattggtgtgagatatgtgaatcaaaattagatgcaagcaaatggttttatacatgtgaattttgcagcatcactctccatgtcaactgtttacaagggaaagatatgtacatgaagccccactacatcttcaaattggtttctggtagatatgaagttgaaattgctcgaaatgatggtaacactcggccactttgctctcaatgtaatcttctttgtgcacagactttggtattcaagcagataggcagatacgaaagttgttgtactcttgattgtctggcaaattacatttggaaattagcattggccaaaagagaaaggtga

SEQ ID NO: 1242 - protein, 694 aa, Arabidopsis thaliana
MEAPSPFFSRSKPKCRLSDPAQPLNLFRLGCSSSKGNDMEDTPPPFFSTSKPKCRLSDPAQPHKLCRRGYRSHPRLSMCFSCKGKDMEDSRYYYYCVTCKLEFHRGCHVFPPEIKHIFHPSHPLTLISVDPTFDFSPRNWKDKSSTEESIYEVDDDCEDDDNNIMTIIIIMMMMMMMMMMMMITMMMLLMMMMMMMMMMMIACLSDGNHLKCKCCQVPLQKVYYHCSICKFYLNATCSMRPPPPTISHIKSHEHTLTLFPIRLPFPCDACGLSLSETDDLVYACLPCSHMVHRSCIYLPRVIKITRHPHRLSFSLSLQPGDFLCGVCRQTIDVNNGQYSCNKGCHYAVHSKCATRKEVWDGKDLEGVPEEPEEYMESFVRIDEETIQHFSHEHYLKLYEKNNICEKDKVCEACTLPVMISQRYYGCMKCDFVLDEACAFLPRKKYHPLHKHPLTLHAFPLGRISGFGHLYHSASNIFICDGCSRIGCGFVYKCGEQDCTFLVDVNCASLPDPFIHGCHPHDLFFNLTEGKCMGCSSDYCSSYYLECIKCTSFLGIRCATLPTKAHYKYDRHPLTLCYGDEDTTSGQYWCEICESKLDASKWFYTCEFCSITLHVNCLQGKDMYMKPHYIFKLVSGRYEVEIARNDGNTRPLCSQCNLLCAQTLVFKQIGRYESCCTLDCLANYIWKLALAKRER

SEQ ID NO: 1243 - DNA, 2016 bp, Arabidopsis thaliana
  CDS (1)..(2016)
atgagtttgtactttgaaggacacgagcatcacgtatcaatcattaaacatcgtgatggtttggaatgcgatgcttgcgatcggtcgtttggggatgtcatctcatgcggtgaatgcaagtttactgttcacaggaaatgtgtatttatgttcgacatacaagagatattcgaccacccttctcatgatggacattgtctcaagcttctcacgacaggagctcctgatgacaccgaccaaaaatgtcatctctgcggtaaaaagaccaagcgccttctttatcattgctctgattgtaaactcaatgtggatattgattgcataattgattacatatgtgctcgatcccctctgaaattgccatggcacgaccaccctctaatcaaggttgatctcggagctaatatgccttgcgacttttgtaatgaaagtggcatagactattgttgccctcgttgcaggttcatgattcatgagagatgtgcctctgtatttgactcaccagagattactcacccttctcatgtcagacaccctcttaagcttcgcagcaatggagctccagattacacaaacttaaattgtcatatatgtggagatgccactgggaacttactatatcattgtgatatttgtaagttcaacttgaatatgcgttgtgcgattcgagaacccacaccagttgctctttcaaatatgaaggtccatgagcatacactcacactcatgccaagattgatctcctttgtttgtgatgcttgtgggatgaaaggcgaccgtgctccctatgtatgtgttcaatgcgatttcatgatcttccatcaagagtgtgctaaattacctcgtgtcattcatgtcaaccaccatgaccaccgcgtttcgtacaagtatcctcttggtcccggagaatggagatgtggagtttgttgggaagaaattgattggtcatatggggcttattcatgctctctttgtcctaattatgctatgcattcactgtgtgcaacaaggaaagatgtatgggatggaagagagcttgatggagtacttgaagaaattgaagatattgagccatttaagaggaatgatgataacaccatcactcatttcactcatgaacataacttgagcaaagatggtattactttgaagaagagcatcttgtgtgtagcatgtgtttgtcccatcggtaccgacacattctacaactgttcagaatcatcttgcagtttcgttctccacgaaacgtgtgctaatatttcaaagaagaaacgacattttctgagcccagtacctctcgttctttgcctccaaaaccaacgcaacacagaaacttgcaatgcttgtcaacaagttttttgcaaaggatttatctactcttcatttccaaaaactgtatatcgggaaaagttctatgacttacaatgcagttcgattactgttccttttttccatggaagtcatgatcatcatttactcttccttaaacttggacgcggtaatgtgaagacttgcgagtgttgcggcatcgtccaaaaagagtatgctataggttgtaccaaatgcaattactttttggattttcgttgtgccactctaccattaacggtaaggcttccaaggtatgatgatcatccactcactctttgttatggtgatgaaaaagcaagcggaaaatgttggtgtgatatttgcgaaagagaaacaaatccaaagagttggttctacacttgtaaagattgcggggttacttttcatatattttgtgtagtttgggatatcagattctccaaacaaggagaaacaatcagagacggtgttgaattgctgccaaacaatacatcttcacggccactttgcaagaattgtcaatgccgttgcctaggtcccttctttgttaaggattatgacaacatatgctattgttcttactactgttatgcacggcttcattctctgaggtacatttggagtaaattcagatgccctccatggatatcagaacccagtacttga

SEQ ID NO: 1244 - protein, 671 aa, Arabidopsis thaliana
MSLYFEGHEHHVSIIKHRDGLECDACDRSFGDVISCGECKFTVHRKCVFMFDIQEIFDHPSHDGHCLKLLTTGAPDDTDQKCHLCGKKTKRLLYHCSDCKLNVDIDCIIDYICARSPLKLPWHDHPLIKVDLGANMPCDFCNESGIDYCCPRCRFMIHERCASVFDSPEITHPSHVRHPLKLRSNGAPDYTNLNCHICGDATGNLLYHCDICKFNLNMRCAIREPTPVALSNMKVHEHTLTLMPRLISFVCDACGMKGDRAPYVCVQCDFMIFHQECAKLPRVIHVNHHDHRVSYKYPLGPGEWRCGVCWEEIDWSYGAYSCSLCPNYAMHSLCATRKDVWDGRELDGVLEEIEDIEPFKRNDDNTITHFTHEHNLSKDGITLKKSILCVACVCPIGTDTFYNCSESSCSFVLHETCANISKKKRHFLSPVPLVLCLQNQRNTETCNACQQVFCKGFIYSSFPKTVYREKFYDLQCSSITVPFFHGSHDHHLLFLKLGRGNVKTCECCGIVQKEYAIGCTKCNYFLDFRCATLPLTVRLPRYDDHPLTLCYGDEKASGKCWCDICERETNPKSWFYTCKDCGVTFHIFCVVWDIRFSKQGETIRDGVELLPNNTSSRPLCKNCQCRCLGPFFVKDYDNICYCSYYCYARLHSLRYIWSKFRCPPWISEPST

SEQ ID NO: 1245 - DNA, 1695 bp, Arabidopsis thaliana
  CDS (1)..(1695)
atggaggaagagattgctgatggtggaattctatctccgtttcacaaccatcctttatacccaacagacgattcgtcgactccgtgcgttgggtgtggtgaagagacagctggaaaacacgcttgccatatttgccatgagatcaacgtccataagggttgccttgaaatcatcaacccttccagtcccgcacatcctctatccttaaccgacagatttgacgattatatcaaatgtaccatatgtcactgggtatttcacagatatatgtattattgttccttttctggtctccctgtttgtaaacaatgtgtgaggaagccctttattcttgacccggaaaaggcacacgagcatccactcctcatctttcttaaagggtctttctcttttccttgtgatgcgtgtggagtgaacgatgctaattcatgtctttgtctatgtatcccatgtcgtttcaccatccacatggactgtgtctacttaccgcgagtcatatgtgttaaccgtcatgatcaccgcatctcgcatgttcctcgtctaggctcaggaaattggagttgcggggtgtgtcgtaaggaggtcaacggcatgtatggggcttattcatgcttgacctgcactttcgttgttcattcaagatgtgcaataaggagtaatgtttgggatgggatagaattggaaggggtgcctgaagaagacccggcaaatcttttgccattctatgtggtagaagaggggctgatcaaacattttactcacgaacacaatctaagactcgtcaatgaggatgatatccttcatgatataagcaagcaatgctatgggtgcgtccttccaatcttttttaattcatgctacatatgcacgctttgtgatttcgtactacatgaaacatgtgctaacctctccaagaagaaaaggcatccgtctgagagtcggagattgactctgtatgatgagtattacgtaaattcacttatgaggaagggtcctttcatatgtttcgtatgtaatcaacgctgcagcggcttcgcatacgtggaagacagtgagcgtcgtgacggcttgaagattgatgtacgatgtgtttcaatttacgatgggtatgtccataaaagtcaaccacattcaatgcttgtagttcccgataattggagcacatgctcgatttgcggaaaaggtggtgagcatatgtggagtttgactgggcaggatgatttatttatgtgctacaagtgtgctactatccctgaactggcaatgcacaaatacgatgttcatcctttgtccttacaattcggtgagatggccaagggtgattattggtgtgacatatgcgagaagattctagatccacaaaagtggttctatacgtgtgacttgtgttgtaccactcttcatattgattgcgtacttggaatggagccatatatgagggttggatccaccttccatttgaaacgatttgtattggaagttctttccaactatagtgcttctcggccacattgttacacttgttcgtctcgtatcaatgatcttatcgtctacaagagcaaggatgtttacttttgttctttaatgtgtattaaaaagagtccaaaactcgattctggcttgtattggtctaatatgtatgacttcactgagcctgatttgcatttgtctaacttttttcatgatgattcttga

SEQ ID NO: 1246 - protein, 564 aa, Arabidopsis thaliana
MEEEIADGGILSPFHNHPLYPTDDSSTPCVGCGEETAGKHACHICHEINVHKGCLEIINPSSPAHPLSLTDRFDDYIKCTICHWVFHRYMYYCSFSGLPVCKQCVRKPFILDPEKAHEHPLLIFLKGSFSFPCDACGVNDANSCLCLCIPCRFTIHMDCVYLPRVICVNRHDHRISHVPRLGSGNWSCGVCRKEVNGMYGAYSCLTCTFVVHSRCAIRSNVWDGIELEGVPEEDPANLLPFYVVEEGLIKHFTHEHNLRLVNEDDILHDISKQCYGCVLPIFFNSCYICTLCDFVLHETCANLSKKKRHPSESRRLTLYDEYYVNSLMRKGPFICFVCNQRCSGFAYVEDSERRDGLKIDVRCVSIYDGYVHKSQPHSMLVVPDNWSTCSICGKGGEHMWSLTGQDDLFMCYKCATIPELAMHKYDVHPLSLQFGEMAKGDYWCDICEKILDPQKWFYTCDLCCTTLHIDCVLGMEPYMRVGSTFHLKRFVLEVLSNYSASRPHCYTCSSRINDLIVYKSKDVYFCSLMCIKKSPKLDSGLYWSNMYDFTEPDLHLSNFFHDDS

SEQ ID NO: 1247 - DNA, 1656 bp, Arabidopsis thaliana
  CDS (1)..(1656)
atggaagagataggtgaaacacatgagagtgctgatggtggagttctgtctccgtttcacgagcatcctttatacccaacaaaagattcgtcgactccgtgcgttgggtgtgatggtgacgagacagctggaaaatgcagttgccatatttgcgagatctacgtgcataaggattgccttgagatcatcaacccttccaatcccacatatcatctatccttaactgatagatatggtaaattgtttcgatgttccatatgtacatctatatcatacagatatatctatctttgttccttttctggtctccctgtttgtgaaaagtgtgcgaggaagccgtttactattgatccgggtagggctcatgagcatccactcctcgtctttctcaaagggtctttctcttttccttgtgatgcgtgtggagtgaatgatgctaaatcatgtctctgtctatgtatcccatgtcgtttcaccattcacaggaaatgcgtctacttaccgcgggtcatatgtattaaccgtcacgatcaccgcatctctcatgttcctcggctaggctccggaaattggagttgtggggtttgtcgtaaagaggtcaacgggatgcatggggctttttcatgcttgacctgcactttcgcggttcattcaagatgtgcaataaggagtaatgtgtgggatgggatagaattggaaggagtgcctgaagaagacccggcaaagaatttgcctttcaaggtggtaggagaggggctgatcaaacattttactcacgaacacaatctaagactcatcaatgaggatgatatcctttatgataaaagcaagcaatgtcatgggtgcgtccttccaatcttttttaatgcatgctacatctgcacacattgtgatttcatattacatgaaacatgtgctaacctctccaagaagaaaagacatccgtcagtaagtcggcaattgactctatatgctaagcactactacggaatggattcattttcttgggacggccctttcagttgtttcgtatgtagtcaacgttgcagtggtttcgcatacgtggaagacaatggtggccgtcctggcttcactattgacgtacgatgtgtttccatttacgctggatttgtccataatagtcaaccacattcaatgctcgtaatttctgatgattggagcgtatctgacagaaataaatgctcaagatgcggaaaaggaggtaatgatgtatggtgtttgactgggcgggaagatttatttatgtgctacaagtgtgctactatccctgaactagcaatgcacaaatacgatgtgcatcttctgtccttacgattcagcgagaatgccataggtgattattggtgtgacatatgcgagaagattgtagatccacataaatggttctatacgtgtgacatgtgttctaccacccttcatattgattgcgtacttggagccgagccatatttgagggttggatccaccttcaaattgggacgatttgtattggaagtgctctccaacgactatgcttctaggccacgttgtgatacttgttcgtctcgtatcgaagatattgtcgtctacaagagtgaagatgtttatttttgttctttaacgtgtatcgaaaagaatccaagacgagccagatga

SEQ ID NO: 1248 - protein, 551 aa, Arabidopsis thaliana
MEEIGETHESADGGVLSPFHEHPLYPTKDSSTPCVGCDGDETAGKCSCHICEIYVHKDCLEIINPSNPTYHLSLTDRYGKLFRCSICTSISYRYIYLCSFSGLPVCEKCARKPFTIDPGRAHEHPLLVFLKGSFSFPCDACGVNDAKSCLCLCIPCRFTIHRKCVYLPRVICINRHDHRISHVPRLGSGNWSCGVCRKEVNGMHGAFSCLTCTFAVHSRCAIRSNVWDGIELEGVPEEDPAKNLPFKVVGEGLIKHFTHEHNLRLINEDDILYDKSKQCHGCVLPIFFNACYICTHCDFILHETCANLSKKKRHPSVSRQLTLYAKHYYGMDSFSWDGPFSCFVCSQRCSGFAYVEDNGGRPGFTIDVRCVSIYAGFVHNSQPHSMLVISDDWSVSDRNKCSRCGKGGNDVWCLTGREDLFMCYKCATIPELAMHKYDVHLLSLRFSENAIGDYWCDICEKIVDPHKWFYTCDMCSTTLHIDCVLGAEPYLRVGSTFKLGRFVLEVLSNDYASRPRCDTCSSRIEDIVVYKSEDVYFCSLTCIEKNPRRAR

SEQ ID NO: 1249 - DNA, 1626 bp, Arabidopsis thaliana
  CDS (1)..(1626)
atgtctaaactcatgctgccgtttcatgagcatcctatgacaatttcgaacctatacaaccatgcttgcgatttttgccctggaagaccgaaacctggcaccatatttttttgcgagaagtgcgacttggatctgcacaagggatgtgccggcaaattcctcaacaactcatctcgctgtaatcactctctcaagattttccaaggtaggttcggacagttcggtgaagatgacgactaccaatgccattattgtcaacaaaatgtaggatttcattttgctcgttgcacgatatgcaacataagcatcgacgaaaagtgtctgcgaaatccaccaccactcactattttccaaccaaagcaccacaagcatagcctcttcctcttgggaagactagtcgcatttacttgtaatgcatgtggtgtggaaggcgaccgcaatccttatatatgtattgaatgcaatctgatgctccacaaagagtgtactgatctaccaagggtcataagcataaatcgtcatgagcatcgcatatctcatacctttcatcttggcaaaggagaaggcgtttgggagtgtggagtttgtcggaagacgattgattgtgtctatggagcttttatatgctctcgctgtcccagtagttatgctgttcattcaagatgtgcaacaagaaaagaagtatgggatgggatagaactcgaagatgtgccagaagaagatgaagaactcgaagatccattcaaggtaattaatgaaaaaggagatattgttcattttagtcatgaagaacacgttctcagattggatgtgaattatgttcatgataatgatactatgtgctgtggaggttgtattcttcccatcaatgatgatccatgctacaagtgcgtggaatgtgatttctgccttcacaaaggatgtgctagtcttcctcgaaagaaagcccattttttgcacaaccataaaattagcctacgggctcataaggatgacgtttatgtagataaatgcggagcttgtaaaacttattctaatggtttcaagtacgagtgtcacgacaaaagcagctgtagaggtaatataaagtatgatatccgttgtagctccatatcagagccgtttcaccatgatgatctgcatccacatcctttatattggaccttggaagaaaccaaacagtgtaaggcttgtggcacagagatacttaagcctttaagttgtttggtgtgtgagtatgctctatgtataaggtgtgctactttaccaaaaaaggtaaaacataggtgtgatgatcacttcttgtcactatgccatgatgctggaaactcgagcggtgacttgtggtgtgatatttgtgagaccaagaccgatccaagtgtatgttactacacttgtgataagtgtggggtcagtctccatattaattgtgtactaggagatttatattatacgaaggtaggactcgtctatcctggtcttgaagtacttcccaacaatggtgctactcgacctttctgcaacagctgtaaagttcgttgcaagttcagcttccttatgaagcaaactctaggagaccttgttcgttacttttgttcaatacgttgtattcctagagcaaggtaa

SEQ ID NO: 1250 - protein, 541 aa, Arabidopsis thaliana
MSKLMLPFHEHPMTISNLYNHACDFCPGRPKPGTIFFCEKCDLDLHKGCAGKFLNNSSRCNHSLKIFQGRFGQFGEDDDYQCHYCQQNVGFHFARCTICNISIDEKCLRNPPPLTIFQPKHHKHSLFLLGRLVAFTCNACGVEGDRNPYICIECNLMLHKECTDLPRVISINRHEHRISHTFHLGKGEGVWECGVCRKTIDCVYGAFICSRCPSSYAVHSRCATRKEVWDGIELEDVPEEDEELEDPFKVINEKGDIVHFSHEEHVLRLDVNYVHDNDTMCCGGCILPINDDPCYKCVECDFCLHKGCASLPRKKAHFLHNHKISLRAHKDDVYVDKCGACKTYSNGFKYECHDKSSCRGNIKYDIRCSSISEPFHHDDLHPHPLYWTLEETKQCKACGTEILKPLSCLVCEYALCIRCATLPKKVKHRCDDHFLSLCHDAGNSSGDLWCDICETKTDPSVCYYTCDKCGVSLHINCVLGDLYYTKVGLVYPGLEVLPNNGATRPFCNSCKVRCKFSFLMKQTLGDLVRYFCSIRCIPRAR

SEQ ID NO: 1251 - DNA, 918 bp, Arabidopsis thaliana
  CDS (1)..(918)
atgagttctgtgggtgtatttcttaaggaggaaattgatggaaaaccttttttggtattcacattagcacaaacaaaaaaccttacctcttctagtggagcactagccataaattctggtagcgacaacctccctcttcaacctctttttttctgccctgcttcccgtatcaattttcagaacctcaaccttacggaggaggataaggagaagtttcggccatttaattcttctcctcatttcccaaacacaagaagcggtgatcagcaaggcggatctttgcttgattgcgaccaacatggtatatgtaagctccctgtagtccctctcttttggtgcaacaataaaagtcctagttctgacgaattcatgtgcggtgcatgcgaaaaaatagtgctcagcacaaactattttgcatgtctccagtgtcaaaaaaatttccataaagaatgcgtccagtctccacttgagatcaaacacccttcccacccctttcactctcttcgactttatagttacctaaaagatttcaagacatgcttttgttgtaaagtttttaacagtatggtcatgctttatcattgtaccacctgggatttgagtatgcatacagtatgtgcgatgagatcaataccctttgttgtcgaccatccaaaaagccatttacatcctcttaccttttttcccgcacaagcttctttaatttgcagtttctgtgcaacgattaagaagcttgatcccacatacatctgtatcgaatgtgtcttcgtgatccatgaacactgtatgggtttcccacatgtcataagaatatcccgtcacaaccaccgtatctcttttacctcttctcttccatccggaaatctgttttgcagagcttgtcatcaacaagttgacaacgattatggtgcttactga

SEQ ID NO: 1252 - protein, 305 aa, Arabidopsis thaliana
MSSVGVFLKEEIDGKPFLVFTLAQTKNLTSSSGALAINSGSDNLPLQPLFFCPASRINFQNLNLTEEDKEKFRPFNSSPHFPNTRSGDQQGGSLLDCDQHGICKLPVVPLFWCNNKSPSSDEFMCGACEKIVLSTNYFACLQCQKNFHKECVQSPLEIKHPSHPFHSLRLYSYLKDFKTCFCCKVFNSMVMLYHCTTWDLSMHTVCAMRSIPFVVDHPKSHLHPLTFFPAQASLICSFCATIKKLDPTYICIECVFVIHEHCMGFPHVIRISRHNHRISFTSSLPSGNLFCRACHQQVDNDYGAY

SEQ ID NO: 1253 - DNA, 999 bp, Arabidopsis thaliana
  CDS (1)..(999)
atgatagatgatggtgagccgttcgagaggatagctgaaggaataatactccatccttttcatagtcaccaactacaacttgagatcttcagagattacgacgaaaagaagtattgtcgagggtgtgcgcttccaatctacgaaggtcaattctattcatgcatggaattggaatgccactatatcctccataaaagctgtgcagaagctccacgtatgaaacggtatcccttatttccacatccacttacactaaaagttgccaccacacatgatagtggcagaggtcacttttgttgtagtgaatgtgggcgtgatggcaatggctttttctatgagtatcgtaaagagcaaaaaatattccggctagacttacggtgtgcctccattatggaaccgtatgaatatcaaggccaccaacatcccttattcctaccttggtacacagaggaaaagacaccatgtcaagtgtgcaaatacaaaagctacaactcaaagttaatttgcatggaatgcgattattctatatgtctccgttgtgctaccttcccatacaaggcaaggtataagcatgacagtcattttctcacaatctgtgatgggaaagaggcaaatgatcaaccagactggtgtgaggtgtgcgaatgcaaaatagaagatgtaaagaagcctggatataataagaatatgcaaaatgtggaaaaacgattttataaatgcaatgactgctgcaccactcttcatattgattgtttatttgggggagacatgtacatgaagcccggtgaaacagaatatgactacctctcctttggcgtgtactcattcgaagatcgagattacaattggatagatgttagggctcttcttaacagttccctctcccgaccaatttgcgttcaatgcatgtgccgttgtccattcccaatatttttcaagttgaaaggtaacggcagaatatactgttctgtgtattgtcttgggtttgcacggttatga

SEQ ID NO: 1254 - protein, 332 aa, Arabidopsis thaliana
MIDDGEPFERIAEGIILHPFHSHQLQLEIFRDYDEKKYCRGCALPIYEGQFYSCMELECHYILHKSCAEAPRMKRYPLFPHPLTLKVATTHDSGRGHFCCSECGRDGNGFFYEYRKEQKIFRLDLRCASIMEPYEYQGHQHPLFLPWYTEEKTPCQVCKYKSYNSKLICMECDYSICLRCATFPYKARYKHDSHFLTICDGKEANDQPDWCEVCECKIEDVKKPGYNKNMQNVEKRFYKCNDCCTTLHIDCLFGGDMYMKPGETEYDYLSFGVYSFEDRDYNWIDVRALLNSSLSRPICVQCMCRCPFPIFFKLKGNGRIYCSVYCLGFARL

SEQ ID NO: 1255 - DNA, 2934 bp, Arabidopsis thaliana
  CDS (1)..(2934)
atggagtcgaactcgaatcccgagtcagagctcaaatcactcatctttcaaatatatagtctgagcgtgggtttgaatccggattcatatttagatccggactgggattctatttctaagatgataccactcattactcaaacaatctctctggtcagctcaatggatttcgattcgcaaccggggtcgaggctcatgtcactcactaatcaagcaatctatgtcttcaactctatggattttgattcccagccagattcgttaaggaagctcatagctctcttttcacacaagctctctctcgtcaactctacggaatttatttcggagcaggacacgaattcacagccagacttggagtttttcgtgttactcattcgagaattatgtagtccaacaccggagccgccagagcttatatcactcatcagtcaaataattgacgaagtcgtctgttggaagccacagccagagttagttcgtgatttggagccagagccggagccggagccggagccggagccggagattaatcttgggttgaaaatcatatctctcattactcaactaatctcccaaccaatatctttatccattaagacatctctcattcctcaaataatatctatggtcagtaaaattgatttggatgcgcagccggagacggaaatgatgtcactcactactcaagcagtctcgctcttcaactctatggatttgggttcccagccggatccgctaaggaagctcatatctctcatttctggagaaatctctcatgtcaaatctgtcagcgttttaaagcgggagcaagacccggaattgcgtcattctgctggaagtttactaagagtcccacgaggcttatatcgaaattgccatcccgaaatagataccgggacaaagttattgaagcaggattcaaactcgggcacatattcgaacatagagcatttggagatggatttgaacatagagcatttggagatggattcgaactcggacacatatgtgtacataaagctttcggagctagattcagacctggacatagagttcgacctggaggcagatcccgacctctttttccgctattttaaaagagtgagtctcgattcctacctcatttccctcgttggtgaaacattgagtctcgagccacagccggagctcatatcactcatctatcaaatattctcactcgtcgtctctatgtattcagagtggaaaaggcttattttcctttaccctcaagtacaagtaaaattgaaaaaaggaaaatttcaagtgattgacgaagaagtctcgtggagcagcaatggcaagtggaagtgtctcccttttaactgggagaaaatctggatatctgaagaaggcgttagtcatattcgctgccaaacttgcaatggcgagaaccatggagaatatgaaaaggctccagttgtgatcaaacatactcttcatccaaaacattccctccaacttgtcttgttgaatggggacacaaccagggaatgttattgttgcgataaagatctcgaagaggtattttattattgctcggcttgcgattatgctatgaatattgcttgcataaagagaacaagagtattgtctttggaccaaccgaagtggcatgagcatacacttgctcaatttccaagaaagacttctttaacttgcaacgtttgtgccttgacacattcaagctgtccattttatatgtgtcccccttgcgactttgtggtccaccaaaagtgtatcagcttaccacgtgtcataaggatatctcgtcatttccatcgtatccattttactccttctttcgaccaagaagttcgatgttgtggtgtttgtcgtagaaagatcgataatgattatgggggttattcttgcaacaaggacggttgttggtatgcagcacattcaaaatgtgccacacagagcaatgtgtgggatggtaaagaactcgagggagagcccgaagaagacatcaaaaaaattgagccgtttgtgacagtaagagatggaatcatacgacatttcagtcatgaccatcatcatttgaaacttgatgagaacattgacagagattacaacgagaataagttgtgtcaagcatgcatcactccgatatatttcggtaacttctactcatgtatgcaatgtgatttcattcttcatgaagaatgtgcaaaactgtctcgcaaaatacatcacccagtacatccacatctgcttactctagtgggaagatctgaccttgttatggatgctacgaaatcatgttcaatttgttcttggaggtgcacaactggtttcttctatgagtgcagtgaaagagaatgtcgttttaaggtacacgtgcagtgtgccacaatttccgagccattggtccatgcaagtcatatggatcctttgttcttaacatcgaaaccaggagaggaacgaagatgttgtgtttgcaaagagttaggacattgttccacaaatgaaacattcaattgcattgagtgcgacttcgctttgtgtttcaagtgtgctactttacctcaaaaggtgaggtataagcacgataagcatatgcttactctttcttatggagaggaaacaagtaccatgacgtattggtgtgaagtttgcgagaaaaaaataaacccaaaggagcggttttatatgtgtgatgagtattgttgtgtcacccttcacattgaatgtatgcttggggtggacctatacatgaagtctggttcattttggctctattgcagtagcaaggtaagcgttttacccaataatcaccatatgtccagacctatttgctccttttgtaagaagcgttgtccacacaacatagttttccaatgtttaggattaatatcgtgttccacttcttgtattcgcgttaaggattctaaaaagatgaccatgtaa

SEQ ID NO: 1256 - protein, 977 aa, Arabidopsis thaliana
MESNSNPESELKSLIFQIYSLSVGLNPDSYLDPDWDSISKMIPLITQTISLVSSMDFDSQPGSRLMSLTNQAIYVFNSMDFDSQPDSLRKLIALFSHKLSLVNSTEFISEQDTNSQPDLEFFVLLIRELCSPTPEPPELISLISQIIDEVVCWKPQPELVRDLEPEPEPEPEPEPEINLGLKIISLITQLISQPISLSIKTSLIPQIISMVSKIDLDAQPETEMMSLTTQAVSLFNSMDLGSQPDPLRKLISLISGEISHVKSVSVLKREQDPELRHSAGSLLRVPRGLYRNCHPEIDTGTKLLKQDSNSGTYSNIEHLEMDLNIEHLEMDSNSDTYVYIKLSELDSDLDIEFDLEADPDLFFRYFKRVSLDSYLISLVGETLSLEPQPELISLIYQIFSLVVSMYSEWKRLIFLYPQVQVKLKKGKFQVIDEEVSWSSNGKWKCLPFNWEKIWISEEGVSHIRCQTCNGENHGEYEKAPVVIKHTLHPKHSLQLVLLNGDTTRECYCCDKDLEEVFYYCSACDYAMNIACIKRTRVLSLDQPKWHEHTLAQFPRKTSLTCNVCALTHSSCPFYMCPPCDFVVHQKCISLPRVIRISRHFHRIHFTPSFDQEVRCCGVCRRKIDNDYGGYSCNKDGCWYAAHSKCATQSNVWDGKELEGEPEEDIKKIEPFVTVRDGIIRHFSHDHHHLKLDENIDRDYNENKLCQACITPIYFGNFYSCMQCDFILHEECAKLSRKIHHPVHPHLLTLVGRSDLVMDATKSCSICSWRCTTGFFYECSERECRFKVHVQCATISEPLVHASHMDPLFLTSKPGEERRCCVCKELGHCSTNETFNCIECDFALCFKCATLPQKVRYKHDKHMLTLSYGEETSTMTYWCEVCEKKINPKERFYMCDEYCCVTLHIECMLGVDLYMKSGSFWLYCSSKVSVLPNNHHMSRPICSFCKKRCPHNIVFQCLGLISCSTSCIRVKDSKKMTM

SEQ ID NO: 1257 - DNA, 1671 bp, Arabidopsis thaliana
  CDS (1)..(1671)
atgtcttctactgaccacgaagaagttacccttccgtttcatcatcatcctttatcatgtggtacttttgagtcttacactttccgctccatattatctatcccgaagctaagaaatggcatatacaactgctatcactgcaaggagtgcagcttgacgtttcacaaagaatgggctgacagcttcttcagccagcaatttatctgcaatcacgttctcaagatcttccgccgggctaagacaccattagttgacagtacagatgaccacttttgtcatttttgtcgaagcaagcttaagttaaagcatttccggtgcacgatatgcaacataagcgtgggtagagaatgtgtgaaagatccaccaccactcacaatttatcaaccaaagcaccacaagcatagcctcaccctcttgttaaggttagtcacctttacttgtaatgcatgtggtgtggaagacgaccgcaatccttatgtttgtcttgaatgcaatttgatggtccataaatattgtattgagaaactaccacgcgtcataagcataaaccgtcatgaccatcgcataaatcatacctttcatcttggtcaaggagaaggagataaagagtgtggagtttgtcggaagaagattaattgggcctacggaggttatgaatgctctcgttgtcctagttatgccgttcattcaaggtgtgcaacaagaagagaagtgtgggatgggttagagctcgaagatgtgcccgaagaagaagaagaaatagaagatccattcaaggtagttaatgaaaagggagatatcgttcatttttgtcatgaagagcatgttctcagattggatgagaattatgttacagataatgttaacatgcgttgtcggtgttgtgttcttgccatcgacggggatccatgctacagatgcctggaatgtgatttcatacttcatgaaaagtgtgctaatcttcctcggaagatgcgacatttattgcacaaccataaactctctctagaggtttcattcacacgttttcgtcgatcagacaatttcttttatacgtgtattgcttgtcaaacccacactgatggcttcatatacgcgtgtcatgatgggctttgtagatacctcgttaaaagtattaagtatgatgttcggtgtagctctgtatcagaaccgtttcaccatgatctccatcaacatcccttatactttacgttgcaaagttccagacaatgtcaggcttgtggcacaaaaatagatcatgatcccttaagttgtacggtttgtgatgattactctttatgcatgaggtgcactactttaccaagaaaggtaaaacacaggtgtgatgatcattttttgtcactatgtcaaggttcttccgtaaacgattccggcgacttgtggtgcgatatttgtgagacgaagacagatccgagtgtatgttattatacttgtgatgagtgtgggcttagtcttcatattgattgtgtacttggagatttatattatttgaagctaggaatcccagaacctgatgttgaaatatgtccaaacaatgaggctactcgacctctctgcagtggttgtaaagttcgttgcaagaaccctttcttcataaggagtacagaagaagaacctgcatcacacgcttgttcaatagactgctcataa

SEQ ID NO: 1258 - protein, 556 aa, Arabidopsis thaliana
MSSTDHEEVTLPFHHHPLSCGTFESYTFRSILSIPKLRNGIYNCYHCKECSLTFHKEWADSFFSQQFICNHVLKIFRRAKTPLVDSTDDHFCHFCRSKLKLKHFRCTICNISVGRECVKDPPPLTIYQPKHHKHSLTLLLRLVTFTCNACGVEDDRNPYVCLECNLMVHKYCIEKLPRVISINRHDHRINHTFHLGQGEGDKECGVCRKKINWAYGGYECSRCPSYAVHSRCATRREVWDGLELEDVPEEEEEIEDPFKVVNEKGDIVHFCHEEHVLRLDENYVTDNVNMRCRCCVLAIDGDPCYRCLECDFILHEKCANLPRKMRHLLHNHKLSLEVSFTRFRRSDNFFYTCIACQTHTDGFIYACHDGLCRYLVKSIKYDVRCSSVSEPFHHDLHQHPLYFTLQSSRQCQACGTKIDHDPLSCTVCDDYSLCMRCTTLPRKVKHRCDDHFLSLCQGSSVNDSGDLWCDICETKTDPSVCYYTCDECGLSLHIDCVLGDLYYLKLGIPEPDVEICPNNEATRPLCSGCKVRCKNPFFIRSTEEEPASHACSIDCS

SEQ ID NO: 1259 - DNA, 1791 bp, Arabidopsis thaliana
  CDS (1)..(1791)
atgactcctgatgatttccaactagccaccatgcctaaactcacggttccttttcatgatcatcctatgtcaagttcttattgtatttttttggaatcttgctctttgtgctctttctctaagaactcttcatggctaagaagaagtgttacttgtatcagttacgagtgtacggattgtggcttgacgttgcacaaagaatgcgttgaccacctcttcctcaaccggccatttctatgcaatcacgttctcaagatctaccgtaataccttcgcgtggcctgaccctgaccgtaaagacgacctttcttgtcatttttgtcgacgtaagcttacgtctttctttgctcggctacgtaatcttccgtctttctttgctcgttgcacgatatgcaacataaacgtggataaaaaatgtttaatggcattgggaccaccactcgcaattttcgaaccaaaacaccacgagcatagtctcaccctcttgttaaggttagtcacctttacttgtaatgcttgtggtgtggtagatgaccgcaatccttacgtatgtcttgaatgcaatttgatggtccacaaagagtgtgttcagaatctaccgcgagtcataagcataaatcgtcatgaccatcgcatatctcatacttttcaccttggtcaaggagaaggagattgggagtgtggagtttgtcggaagacgatcaattgggtctatggaggttataaatgctctcgttgtcctagttatgccgttcattcaagatgtgcaacaagatacgaagtgtgggatggtttagagctcgaagatgtgcccgaagaagaagaagaaatcgaagatccattcaaggtaattaatgaaaagggagatatcattcattttagtcatgaagagcatgttctcagattggacgagatttatgtaacggatgatgctaacatgcgttgtcggtgttgcgttcttgctatcaacggtgacccatgctacagatgcgttgaatgtgatttcatccttcacaaagcgtgtgcgaatcttcctcgaaaaatgcgacatttattgcataagcataaactcactctttcatcgacaggtaaccgttttttgagatgtaaagcttgtgacataaaaactaatggtttcatttacgagtgtcttcatgaaggttgcaaaagtattagttttacgtacgatgttcggtgtagttctgtatcggaaccgtttcaccatgatctgcatcaacatcccttatattttacgttggagaaaaccaataaatgtcacgcttgtaaaagaaaaatagattggaatcccttgaattgtacggtttgtgatgattactctttatgcacgaggtgcgctgctttaccaagaaaggtaaaacacagatgtgatgatcattatctgtcactatgtcaaggtgtgggaagtgcaagtggtgacttgtggtgtgatatttgtgagacaaagacagacccgagtgtattttactatacttgtgatgattgtgggctaagtctccatattgattgtgtacttggggattgctattataccaaagtcggatgcccaggtcctaggatggaagtacatcctaacaatggtgctactcgacctatctgcaccaagtgtgaattacgttgcaagttccccttcttcataaagggtacagaagaagatcttggtatttggtattgttcaaaagatctctgcccaaaggagtttaattttgcagtttcaccttatagattcgctctcgacatcggacttcgggactgggacttgagagtcttttaa

SEQ ID NO: 1260 - protein, 596 aa, Arabidopsis thaliana
MTPDDFQLATMPKLTVPFHDHPMSSSYCIFLESCSLCSFSKNSSWLRRSVTCISYECTDCGLTLHKECVDHLFLNRPFLCNHVLKIYRNTFAWPDPDRKDDLSCHFCRRKLTSFFARLRNLPSFFARCTICNINVDKKCLMALGPPLAIFEPKHHEHSLTLLLRLVTFTCNACGVVDDRNPYVCLECNLMVHKECVQNLPRVISINRHDHRISHTFHLGQGEGDWECGVCRKTINWVYGGYKCSRCPSYAVHSRCATRYEVWDGLELEDVPEEEEEIEDPFKVINEKGDIIHFSHEEHVLRLDEIYVTDDANMRCRCCVLAINGDPCYRCVECDFILHKACANLPRKMRHLLHKHKLTLSSTGNRFLRCKACDIKTNGFIYECLHEGCKSISFTYDVRCSSVSEPFHHDLHQHPLYFTLEKTNKCHACKRKIDWNPLNCTVCDDYSLCTRCAALPRKVKHRCDDHYLSLCQGVGSASGDLWCDICETKTDPSVFYYTCDDCGLSLHIDCVLGDCYYTKVGCPGPRMEVHPNNGATRPICTKCELRCKFPFFIKGTEEDLGIWYCSKDLCPKEFNFAVSPYRFALDIGLRDWDLRVF

SEQ ID NO: 1261 - DNA, 1743 bp, Arabidopsis thaliana
  CDS (1)..(1743)
atgtcttctactgatgtcgaagtagtcacctttccgtttcatgatcatcctttatcatgttgtgatgatcctgttgctgctgaattttactgctcattgtgctctcattatcattccctcagttggcaagtattcaggtccggcgtatggcagaatgaagtggagccatggtttaggacatctgaataccacggaccggccctgcgaatatccaataacatcaactatcattgcaaggagtgcgacattatgatgcacaaagactgcgttgaccgcttattcaatcagccatttatatgcaatcacattctcaagatctttgttagcactatctcaccacttgacagtatagttgacgacctttgtcatttttgtcgatttgaggttcatcatatgtttcttcgttgcacgatatgcaacataagcctgcatataggatgtgtggcggagccaccaccactcacaatttctgaaccaaaacaccacaagcatagcctcagtctcctgctaaggctagtcacctttacttgtaatgcttgtggtgtggaaggcgaccgcaatccttacgtatgtcttgaatgcaatctgatggtccacaaagattgtgttgagaatctaccgcgagtcataagcataaatcggcatgaccatcgcatatctcatacttttcatcttggtgaaaaagaaggagattgggagtgtggagtttgtcgaaagatgattaattgggtctatggaggctataaatgctctcgttgtcctagttatgccgttcattcaaaatgtgcaacaaaaaaagaagtgtgggatgggttagagctcgaagatgtgcccgaagaagaagaagaaatcaaagatccattcaaggtaattaatgaaaagggagatattgttcattttagtcatgaaaagcatattctcagattggatgagaattatgttacggatgatgctaacatgcgctgtcggtgttgcattcttgctatcaatggtgatccatgctacaaatgcatggaatgtgatttcatccttcataaagcgtgtgctaatcttcctcggaagaggcgacatttattgcacaaccataaactcactctttcatctaggcgtattgatgaagataattttcttgagtgtagtgcttgtcgaatctatacagatggtttcatatacgagtgtcttcatgaagattgcgaaaataagaacgcctatgatgttcgatgtagttcggtatcggaaccgtttcaccatgatttacatcaacatcccttatattttaccttgcaaagttctagacgatgtcaagcttgtaacaaagaaataaaagatgatcccttaaattgtacggtctgtgatgaatactctttatgcatgaggtgcgctactttaccaagaaaggtaaaacacaggtgtgatgatcattttctgtcactatgtcaaggtgtgggaaacgcaagtggtgacttgtggtgtgatatttgtgagacgaagacagatccgagcgtacgttactatacttgtgatgagtgtgggctaagtctccatattgattgtgtacttggagatttatattatatgaagctaggacaccaaaaccctgagatggagatacatcctaacaatggtgctactcgaccttcttgcgcccgttgtggatttcgttgcaagttccccttcttcgttaggggtacaaaagaacaatctgctctttatgtttgttcaatagacttatgcccaaggtag

SEQ ID NO: 1262 - protein, 580 aa, Arabidopsis thaliana
MSSTDVEVVTFPFHDHPLSCCDDPVAAEFYCSLCSHYHSLSWQVFRSGVWQNEVEPWFRTSEYHGPALRISNNINYHCKECDIMMHKDCVDRLFNQPFICNHILKIFVSTISPLDSIVDDLCHFCRFEVHHMFLRCTICNISLHIGCVAEPPPLTISEPKHHKHSLSLLLRLVTFTCNACGVEGDRNPYVCLECNLMVHKDCVENLPRVISINRHDHRISHTFHLGEKEGDWECGVCRKMINWVYGGYKCSRCPSYAVHSKCATKKEVWDGLELEDVPEEEEEIKDPFKVINEKGDIVHFSHEKHILRLDENYVTDDANMRCRCCILAINGDPCYKCMECDFILHKACANLPRKRRHLLHNHKLTLSSRRIDEDNFLECSACRIYTDGFIYECLHEDCENKNAYDVRCSSVSEPFHHDLHQHPLYFTLQSSRRCQACNKEIKDDPLNCTVCDEYSLCMRCATLPRKVKHRCDDHFLSLCQGVGNASGDLWCDICETKTDPSVRYYTCDECGLSLHIDCVLGDLYYMKLGHQNPEMEIHPNNGATRPSCARCGFRCKFPFFVRGTKEQSALYVCSIDLCPR

SEQ ID NO: 1263 - DNA, 2088 bp, Arabidopsis thaliana
  CDS (1)..(2088)
atgcaaggggaagaggagaatacaaatatcacaaaaatccaaatttcctttgtagcaaccatgagttccgtgggtgtatttcgtaaggaggaaatcgatggaaacccatattttgtgatattaacagaaacaaaagttgatcaaaaaagaagaaaaaaaacatattttttatgtcctgctgcacgtataaaatatctaaagttcaaacgaaagatgctcgagaattatgattatggtgacgataacgaagacgacgataatgatgctgacgaagatgccaaagaagatggcgatggtcatgacaagctgtatccattcaattcttcctctcacttccccaacacaagacgcggtgatcgacaaggcaaatctttgcttgactgctacctccctggaatctgtaagaaccccgtagttcctcttttcaggtacaacgataaagaaccttattgtcacatatcccagtgcggtgcatgcaaagggaaaatgctcgacacaagcaaagattatgcatgtctccaatgtcaaagaaagttccacagagaatgtgttgagtctccacttgagatcaaacacccttcccacccctttcattctcttcgactttacggtcttccaacgtttcagaagtgcttttgttgtgaaacatctctctacgacatgttttatcattgtgctacctgcgatttgagtatgagtccggtctgtgcgttgaagccggtacccattgtcatagaacaatcaagaagtcatcaccatcctctcacctttttccctgcacaagctttaatttgccatatatgcgccgtgattaagaagtttgatcccgcatacatctgtgtccaatgcgtctttgtcgtccacaaaaactgtatcggttttccacatgtcataagaatatcacgtcactctcatcgtatctcttttacgtcttctcttccatctagaaagctgtcatgcggagtctgtcggaaacaagttgacaacaaatatggtgcatactcttgccttgaatgtgatgcttattttgttcattcaagttgtgcaacacatccaaaggtgtgggatggaaaagaactcgaaggagtaccagaagaagatgatataatagacgatggtgagccgttcgagagaatagctgatggaataatactccatccgtttcatagtcaccatctacgacttgagatcagcatagcttatgatgcaaataagtattgtcgagggtgtgcccttccaatctatgaaggtcaattctattcatgcatggaatgcgacttcatcctccacgaaagctgtgcaaatgctccgcgcatgaaacgacatcctttatatccacatcctcttacactaaaagttgccaagcataatattgacggaggtatatttcattgtagcgaatgcaggcgtgttggtaatggcttcttctatgagtgtggtaaagagaataatatcgtccagctagacttacgatgtgcctcgattatcgaaccatttgattatcaaggtcatgagcatcccttgttcctaccctgggaaacagagaaagagacacgatgtcaaatgtgcaaatacgacagcggccattcaaagttaatttgcatggactgcgattattctatatgtttccggtgtgctacattcccatacatggcaaggtataagcatgacagtcattttctcacaatttccaatgggaaagaggaaagtgatcagcaagattggtgtgagatttgtgaacgcaaaatagtaaaagtaaaagaaagagggaatgtgctgtggaatcagaaagaagcattgcgatatagatgcaatgtttgctgcaccactcttcacatagattgtttacacgggaaagagatgtacatcaaacctcgggaaacagaacgagatcatctcacttttcacacttttagagacatggaaaggatatttattagagtccatctcaacagttctctctcccgacccgtttgcagtagatgcaatcgtcgttgtccattcccaatatttttcaaagggttaagactaatctattgttctctggattgtgttagaaatctgccacgtttttcccttttagtttga

SEQ ID NO: 1264 - protein, 695 aa, Arabidopsis thaliana
MQGEEENTNITKIQISFVATMSSVGVFRKEEIDGNPYFVILTETKVDQKRRKKTYFLCPAARIKYLKFKRKMLENYDYGDDNEDDDNDADEDAKEDGDGHDKLYPFNSSSHFPNTRRGDRQGKSLLDCYLPGICKNPVVPLFRYNDKEPYCHISQCGACKGKMLDTSKDYACLQCQRKFHRECVESPLEIKHPSHPFHSLRLYGLPTFQKCFCCETSLYDMFYHCATCDLSMSPVCALKPVPIVIEQSRSHHHPLTFFPAQALICHICAVIKKFDPAYICVQCVFVVHKNCIGFPHVIRISRHSHRISFTSSLPSRKLSCGVCRKQVDNKYGAYSCLECDAYFVHSSCATHPKVWDGKELEGVPEEDDIIDDGEPFERIADGIILHPFHSHHLRLEISIAYDANKYCRGCALPIYEGQFYSCMECDFILHESCANAPRMKRHPLYPHPLTLKVAKHNIDGGIFHCSECRRVGNGFFYECGKENNIVQLDLRCASIIEPFDYQGHEHPLFLPWETEKETRCQMCKYDSGHSKLICMDCDYSICFRCATFPYMARYKHDSHFLTISNGKEESDQQDWCEICERKIVKVKERGNVLWNQKEALRYRCNVCCTTLHIDCLHGKEMYIKPRETERDHLTFHTFRDMERIFIRVHLNSSLSRPVCSRCNRRCPFPIFFKGLRLIYCSLDCVRNLPRFSLLV

SEQ ID NO: 1265 - DNA, 2058 bp, Arabidopsis thaliana
  CDS (1)..(2058)
atgagtgaagtcggtgtatttcgtaaggaggaaattgatggaaaattgtttttggcttacacattaacacaaacagaaaccccaacgtcctccggtgaagcagctgcggcggccaaaaaagctatgtattttggcgtcgacgacctccctcttcaacctctttttttctgtccttctgtccgcatcaaatttctccattccaaaccaaaaaaccatgatgatgatcatcatcatggtggtttcatgcctcatccgttaaattctacccctcacttcccttgtacaagaagccatgatcaacaaggcgagtcgttgcttgattgcgacaaagattatatctgtaagctccctgtaatccctcttttttggtgcaacaataaagaatttcgctatggcaaattcgattgtcgtgcatgtaatgggaatattttcagcacaagctattttacatgtctccagtgtcaaggaaagttccacaaagaatgtgtagagtctccacttgagatcaaacacccttcccacccttttcattctcttcgacttttcagtggttcaagtaatcagaagtgtagttgctgtaaagtatatacaccaaatatgtattatcattgtactacctgcgagttgagtatgaatccagtatgtgcaatgaggccggtacccttagttgtagaccacccaaaaagccacccccaccctctctcctttttccctacacaagcttctacagtttgcaatatttgtgcaatgattaagaagcttgatcccacatacatctgtatccaatgtgttttcgtaatccataaaggttgtatgggtttcccacatatcataaggatatctcgtcacccccaccgtatctcctttacctcttctcttccacctggaaacttttcctgcggagtatgtaggcaacaagttgacaacaattatggtgcatactcttgcgagatatgtgatgattattttgttcattcgaaatgttcattacttccaaggatttgggacggaaaagaacttgaaggagtaccagaagaagatgataagatagatgatggggagccgttcaagaggatagctgatggaataatactccatccttttcatagtcaccatatgcggcttgagatcgacaaagcttatgatggaaataagtattgtcgaggatgtgcccttccaatctatgaaggtcaattctattcatgcatggaatgcgacttcatcctccacgaaagctgtgcaaatgctccacgcatgaaacggtatcccttatatccacatccacttacactaaaaggtaccaccacgagacatgagaatcaaaaaggtaaagtttgttgtagcgaatgccgacgtgattgcaatggcttcttctatgagtatcgtaaagaaaaagaaatcttccagctagacctacgatgtgcctcgattattgaaccatttgattatcaaggccaccaacatcccttatttctaccttgggacacaaagaaaaagacacgatgtcaaatgtgcaaatacgaaagcaaggagtcaaagttaatttgcttggaatgcgattattctatatgcttccgttgtgctacttttccgtacaaggcaaggtataaacatgatagtcatttcctcacaatttgtgatgggaaagaggaaagtgacgaaccagattggtgtgaggtttgcgaaggcaaaatagaagaagtaaaagagacagggtataactggaaaggtaaaaaaacagaattgcgatactacaaatgcaatgactgctgcaccgctcttcatgttgattgtttatttgggagagacatgtacattaaacctggtgaaacagaaaaagagtatctctctttttccgatttctcatttagcgaagacgtttggaaatggatggatgttcgggctcttctcaatagttccctctctcgaccaatttgcaatggatgcaagtgccgttgtccattcccaatattttacaaaggggacaaactaatattctgttcttggtattgtcttaagattgagcatccaccgactccctcccgtgtttcttggtaa

SEQ ID NO: 1266 - protein, 685 aa, Arabidopsis thaliana
MSEVGVFRKEEIDGKLFLAYTLTQTETPTSSGEAAAAAKKAMYFGVDDLPLQPLFFCPSVRIKFLHSKPKNHDDDHHHGGFMPHPLNSTPHFPCTRSHDQQGESLLDCDKDYICKLPVIPLFWCNNKEFRYGKFDCRACNGNIFSTSYFTCLQCQGKFHKECVESPLEIKHPSHPFHSLRLFSGSSNQKCSCCKVYTPNMYYHCTTCELSMNPVCAMRPVPLVVDHPKSHPHPLSFFPTQASTVCNICAMIKKLDPTYICIQCVFVIHKGCMGFPHIIRISRHPHRISFTSSLPPGNFSCGVCRQQVDNNYGAYSCEICDDYFVHSKCSLLPRIWDGKELEGVPEEDDKIDDGEPFKRIADGIILHPFHSHHMRLEIDKAYDGNKYCRGCALPIYEGQFYSCMECDFILHESCANAPRMKRYPLYPHPLTLKGTTTRHENQKGKVCCSECRRDCNGFFYEYRKEKEIFQLDLRCASIIEPFDYQGHQHPLFLPWDTKKKTRCQMCKYESKESKLICLECDYSICFRCATFPYKARYKHDSHFLTICDGKEESDEPDWCEVCEGKIEEVKETGYNWKGKKTELRYYKCNDCCTALHVDCLFGRDMYIKPGETEKEYLSFSDFSFSEDVWKWMDVRALLNSSLSRPICNGCKCRCPFPIFYKGDKLIFCSWYCLKIEHPPTPSRVSW

SEQ ID NO: 1267 - DNA, 1737 bp, Arabidopsis thaliana
  CDS (1)..(1737)
atggattctggtggccataaactccctcttcaacctcttttttcatgtcctagttcacgtatcaattttcataagcgcaatcacattgatggtcatgagactcaagagttttatccattcaattgttcccctcacttccccagcaaaagaaccagtactgatcaagaaggcgaatctttccttgattgggacaacccttatatctgtaagcttcctgtagtccttctcttttggtgcaacactgaacaacctgatccagaagattttcggtgtggtgcatgcgggcgtccaacgctcagtgcaacctattatgcatgccttatatgtgaaaaaatgttccacaaagaatgcgtagagtctccattcgagatcatacatccttcccacccttttcactctcttcgacttaccagttctccacagagtcaaaactgcatttgttgtcaccattatttcaacgacattttttatcactgttctacatgcaagctcattatgcatccgatctgtgcgatgaggtcaataccctttgctgtagaccacccaaaaagccattcccaccctctcaccttttaccctgcacaagcttctttagtttgccatttttgtgcctcgattaagaagtttgatcccacatatatttgtatccaatgtgtcttcgcaatccataaagattgtcggggtttcccgcatgtcatcaggatatctcgccaccaccaccgtatatcttttacctcttctcttctatctggaaccttttcatgcggagtctgcagagaacaagttgacaacaattatggtgcgtatgcttgcaataaatgtgatggttattttgttcattcaaaatgtgcaatagatccaaaggtgtgggatggaaaagaactcgaaggagtaccagaagaaaatgataagatagatgatggtgagccgttcaagaggatagctgatggaataatactccacccttttcatagtcaccatctgcaacttgagatctttagagcttatgacgaaaatacgtattgtcgagggtgtgcgcttccgatctatgaaggtcaattctattcatgcatggaatgcgactttatcctccatgaaagttgtgcaaatgctccatgcatgaagcgacatcccttacatccatatccacttacacttttaaacacggcatctcctggtgaggaaagtgtaagccagtgtactgcatgtaggcgtctggttgttggcttctactattttcattatttagataaacatcacgaacgtatagcactagacttacggtgtgcctcgattatcgaaccatttgaattccacggccacaaacatcccttatacctaccttgggaggactcaaataaagtgacgcactgtcaaatctgcaaagaagattttgatatggatagtttggaagtaaattgcatggagtgcgattatacgatatgtttccattgcgcttccttgccagaaaaagtaaggtataagcatgatagtcattttctcatgatctgtgatggaaaagaggcaagtgataaaccatactggtgtgagatctgtgaaggaaaaatagaagttgtaaaagaaaaagcgaattcgggggacaaaaaaaaaaaaaggttgccaacaaatagagacaaaaaagaaaggaaaatttataaatgcaatgactgctgtaccactcttcatgctgaatgtttacttggccagacatttacttcaaatctgctcaaacaatag

SEQ ID NO: 1268 - protein, 578 aa, Arabidopsis thaliana
MDSGGHKLPLQPLFSCPSSRINFHKRNHIDGHETQEFYPFNCSPHFPSKRTSTDQEGESFLDWDNPYICKLPVVLLFWCNTEQPDPEDFRCGACGRPTLSATYYACLICEKMFHKECVESPFEIIHPSHPFHSLRLTSSPQSQNCICCHHYFNDIFYHCSTCKLIMHPICAMRSIPFAVDHPKSHSHPLTFYPAQASLVCHFCASIKKFDPTYICIQCVFAIHKDCRGFPHVIRISRHHHRISFTSSLLSGTFSCGVCREQVDNNYGAYACNKCDGYFVHSKCAIDPKVWDGKELEGVPEENDKIDDGEPFKRIADGIILHPFHSHHLQLEIFRAYDENTYCRGCALPIYEGQFYSCMECDFILHESCANAPCMKRHPLHPYPLTLLNTASPGEESVSQCTACRRLVVGFYYFHYLDKHHERIALDLRCASIIEPFEFHGHKHPLYLPWEDSNKVTHCQICKEDFDMDSLEVNCMECDYTICFHCASLPEKVRYKHDSHFLMICDGKEASDKPYWCEICEGKIEVVKEKANSGDKKKKRLPTNRDKKERKIYKCNDCCTTLHAECLLGQTFTSNLLKQ

SEQ ID NO: 1269 - DNA, 2133 bp, Arabidopsis thaliana
  CDS (1)..(2133)
atggctacagaagcagtagacctaccaattcatgagcaccctctttttccttcggctcgatgtattgatgatgaatgtgatggctgccatgtaaatggtttcatgtacgccggctacttttgcaatgaaccttactgttatgtttggttccataaggactgtgctgaggccccaggggagatcagccatagttcccaccctgaacatcctctcctgctcaccaatgactcgaaagatggtccatgtgatttgtgtggacaaaagctattgactccctgttatagttgtcccacatgtgagttcaaggtggatttgacttgtggtatgaaaccgtcaccgcctgctatcgaacatccgctgtgtcatgatcatgctgtcgtcttcttgaagatacgagaggagaaggttccttgtgaattatgcaaggagtctattgaaggtccatcctattcatgtcttgaatgcgatatgtatttccacgtgaactgcgtccatctctcggaagaggtaaatcatccttgtcattctattcatcctctcaagttaatcacatctgagtcacttacggatgatgccgagaaaagttgtcttttatgtggaaatataccagctgaaaatatgctttatcattgttccgtttgcaatttcacatcgtgccttggttgtaccaaaaacccaccactccttgttattgagcatatgaagacccacaaacacccacttactctcttacctagaagaatctcatgtatctgtgacgtttgtgggaagaaatgccagtttacggcgtatgtatgtcttcagtgtgattttgttaccgcaagaaagtgtatcgacaggccccgtgtcatcaatatcaatcgtcatgatcatcgcatatatttaactcatcatctcggcactgggtattcggaatgcggagtttgtcacaaaaatgtaagtcagtacaagggggcttactcttgctctgtttgccctaactatgctgttcattctacatgtgccgtgagaactgacgtatgggatggcgtagaattggaagggaccactgagatcacagaagacatttcaccattcaaggtggtgggtgataacttgatatgccattttagtcatgaagagcatcaattaaagcttcacaaagaagacgtcattcatgatgagcgcagacgctgtgaagcatgtatccatccagttcaatttggctccatctatgtttgtgaagaagaggaatgttgctttgttctccatgaaaagtgtgctaatcttcctatgaagaaaagacttgtctttggcaccagaccgtacacattaatgaaagaaactaccgaaattacacactgcgagttgtgtggaatattatctgatggtttcgcgtacagctcccatgagtggtcggatgtagatgtgcattgtggttcccttaatgagccgctcgtccatgatggccatatacatcccttatattttgcaaaaaaagaggaacacacttgcgatggatgccaaaagagtatagaagattatatgcttcgttgtaaagcttgtgactttgatttgtgtttgtattgtgctactttaccagaaaagatttggcataggaacgatgggcaccctctcactttatgttgtggtgagaaggaagaggcgagcggtaaatattggtgcgacatttgtgagaaggaattagatccaagtatatggttctatacatgttatgattgtggagtcaccttgcatgctcagtgcgtactaggagatttctcacgtctcgtgctaggacaaatctactcctttggggaaaaagaaatcgagtttgaggcggttcctaacaatatcaacactcggccattttgcatccagtgtaactctcgatgcaaggtctccgtcatcctaaagatcctaaaggattctgaagatggttctgatgatggttctgatgatgtttctgatgatgtttctgatgatccttctaatgatgtttctgatgatacttctgatgatgattctgatgttgtttctgatgttgtttctgatgatgcttctaatgatgattctgatgatacgtcggatgatcacaatgggtatatctgctcccgatcatgtttatcgagttatttgggtgaagaaatttga

SEQ ID NO: 1270 - protein, 710 aa, Arabidopsis thaliana
MATEAVDLPIHEHPLFPSARCIDDECDGCHVNGFMYAGYFCNEPYCYVWFHKDCAEAPGEISHSSHPEHPLLLTNDSKDGPCDLCGQKLLTPCYSCPTCEFKVDLTCGMKPSPPAIEHPLCHDHAVVFLKIREEKVPCELCKESIEGPSYSCLECDMYFHVNCVHLSEEVNHPCHSIHPLKLITSESLTDDAEKSCLLCGNIPAENMLYHCSVCNFTSCLGCTKNPPLLVIEHMKTHKHPLTLLPRRISCICDVCGKKCQFTAYVCLQCDFVTARKCIDRPRVININRHDHRIYLTHHLGTGYSECGVCHKNVSQYKGAYSCSVCPNYAVHSTCAVRTDVWDGVELEGTTEITEDISPFKVVGDNLICHFSHEEHQLKLHKEDVIHDERRRCEACIHPVQFGSIYVCEEEECCFVLHEKCANLPMKKRLVFGTRPYTLMKETTEITHCELCGILSDGFAYSSHEWSDVDVHCGSLNEPLVHDGHIHPLYFAKKEEHTCDGCQKSIEDYMLRCKACDFDLCLYCATLPEKIWHRNDGHPLTLCCGEKEEASGKYWCDICEKELDPSIWFYTCYDCGVTLHAQCVLGDFSRLVLGQIYSFGEKEIEFEAVPNNINTRPFCIQCNSRCKVSVILKILKDSEDGSDDGSDDVSDDVSDDPSNDVSDDTSDDDSDVVSDVVSDDASNDDSDDTSDDHNGYICSRSCLSSYLGEEI

SEQ ID NO: 1271 - DNA, 1971 bp, Arabidopsis thaliana
  CDS (1)..(1971)
atggatacatcagcagtacaactaccctttcgcgattattctcttcaacctgctcctcggtacatcaacgctagatgtcatatctgctctgtaacaggtgccatctacaacggctacttttgcaatgatcctattgtttggatgcataaggagtgcgttgagctcccatctgagatcaaccatcttttccacccccaacatcctctcttgctcacatatgaagagggatggtggagttgtttctgtgctttgtgtggagaaacaaagccagcgaagtacttttatagttgttccacatgtaaaatcaaggtggatttgacttgtgggatgaacccaccaccgccagctattgaacatcccatctgccatgaccatccacttgtcttcctgaagaaaagacaggagaaaaccccttgtgaagtttgcaagaatagaattcttggatcatcctattcatgtcttggatgcgagttgtacttccacgtgggctgcatccatctctcgaaagaggtaaatcatccttgtcactctgatcatcctctcatgctcgtcgaatctgaatcacttacagataatgataagaagacttgttttctatgtgggcaacaaccgcatggtattctttatcattgttctatctgcaacttcacactgtgcattggttgtatcaaatcaccaccacctcttgttgtcgagaatgtgaagacgcacaagcatcctcttactttctttccaagaggagtctactgcacttgtaacgtttgtggggtaaaaggacttatactctcttatatgtgtcttcagtgtggttttgcggtccattgtagttgtgtagacttacctcaagtcataaacataaatcgtcatgatcatcgcatttctttcacacagcatcttggtcctgggtatttgaactgtggagtttgccgaagaagtgtatgccaattcaatggagcttattcttgcttagtttgccccaactatgcagttcattcacggtgtgcaacaagatatgacatatgggatggtgtggaactggaagggaaagctgagaatattgaggatattgcgccatttaaggtggttggggatgacttgattcgtcattttagtcacagcaaacattctttaagactccacaagaacaatatcatttatgatgatagtacacgatgtgaagcatgtggccatccagtcgaatttggtcgaatatacaattgtgaggaatgctgtttcattcttcatgaaaagtgtgctaatctccctatgaagaaaaggcttgtcttttctaccttaccattcctattactgggaccgggtaatgatgtttgcaaggttttagattgcaagttatgtggaatgttttttactggtttcgagtacaagtcccaagaaaggaggcaaagcgatatcgatgtacattgtggttcccttacggagccgttcgtccatgatggccatttacatcccttatattttgatcaaaagcaaaaggagcttccttgcaatgcttgtcaaaaaaccataagagattatatgctttgttgtgctgattgtgacttcaatttgtgtttatggtgcgctagtctgccaaaaaagataaggcatagcaacgatgagcacattctcacgctatgttgtggtgaagaagcaaatggaaaatattggtgtgatatctgtgaggcagagttggatccaagtaaatggttctatacatgctttggttgtggaggcacattgcatgtggaatgcgtactaggagatttctcacgtctcatgccaggatgcaccattgactaccgggtatataccgtggaggtggttttcaataatcacaacacgcgaccaatgtgcagccggtgtcactctcgatgcaaggtttctgtaatccttaagtttcgtgagggtaacattgtatattttttttgttcacgttcatgttttctgatgcatttctcatattatctgtga

SEQ ID NO: 1272 - protein, 656 aa, Arabidopsis thaliana
MDTSAVQLPFRDYSLQPAPRYINARCHICSVTGAIYNGYFCNDPIVWMHKECVELPSEINHLFHPQHPLLLTYEEGWWSCFCALCGETKPAKYFYSCSTCKIKVDLTCGMNPPPPAIEHPICHDHPLVFLKKRQEKTPCEVCKNRILGSSYSCLGCELYFHVGCIHLSKEVNHPCHSDHPLMLVESESLTDNDKKTCFLCGQQPHGILYHCSICNFTLCIGCIKSPPPLVVENVKTHKHPLTFFPRGVYCTCNVCGVKGLILSYMCLQCGFAVHCSCVDLPQVININRHDHRISFTQHLGPGYLNCGVCRRSVCQFNGAYSCLVCPNYAVHSRCATRYDIWDGVELEGKAENIEDIAPFKVVGDDLIRHFSHSKHSLRLHKNNIIYDDSTRCEACGHPVEFGRIYNCEECCFILHEKCANLPMKKRLVFSTLPFLLLGPGNDVCKVLDCKLCGMFFTGFEYKSQERRQSDIDVHCGSLTEPFVHDGHLHPLYFDQKQKELPCNACQKTIRDYMLCCADCDFNLCLWCASLPKKIRHSNDEHILTLCCGEEANGKYWCDICEAELDPSKWFYTCFGCGGTLHVECVLGDFSRLMPGCTIDYRVYTVEVVFNNHNTRPMCSRCHSRCKVSVILKFREGNIVYFFCSRSCFLMHFSYYL

SEQ ID NO: 1273 - DNA, 1956 bp, Arabidopsis thaliana
  CDS (1)..(1956)
atggatacaggagcagtaaagctacccattcacgagcaccctatatttccttcggctcggatcgtttttagtacatgtaaaggctgcggtgtagaagatttcgtctacggcgggtacgtctgcaatgattctgactgtaaagctcggtttcataaggagtgcgctgaggccccatctgagatcagccactctttccaccaacaacatcctctctttctcaccaatggcctgggagatcttccatgtgatttgtgtggacaaaagcgattggaagccgctggttatagttgtcccacatgtgagttcaagctggatttgacttgtgggataaacccatcaccgcctgctattgaacatcctatctgtcatgaccatccacttgtctttttgaagaaacgagaggagaaggccccttgtgaagtttgcaaggattctattggtggaccttcctattcttgtcttggatgcgatctgtacttccacgtggattgcgtccatctctcaaaagaggtaaatcatccttgccaccctagtcatcctctcaagctcatcgcatctgaatcacttacggataatgctgagaagatttgtcttttatgtgaacaacaaccagaaaatatgctttattattgttctgtttgcaacttcacatcatgccttggttgtactaaacgcccaccacctctttttatcgagcataccaagacccacaagcatcaacttactctctttctaaacggaatttcatatcaaggttccgcgctgacatataacagcagagcttatatgtgccttccttgtggtttcgttgtcaatgggaatggtatcaacctacctcaagtcataaacatcaaccgtcacgaccatcgtatctcttacactcatcagcttggccctggatatttgaactgcggagtttgccgcgaaattgttgacagggattgtggggcatatgcttgtgtcgtttgcagtaactatgcagttcactgggaatgcgcagtacatgataatgtatgggatggtgtggaattagaagggacatctgagatcacagaagatattgcaccattcaaggtaatgggtgataacttgataagtcattttagtcatgaacaacatactctaaggctgcacaaagaaggcatcattcatgacgcgtacgcactatgtgaagcatgtacatatccgatcggatttgatccgatctacagttgtgaggaatgtcatttcattctccatgaaaagtgtgctaatcttcctatgaagaagagactcgtgtttgcaaccacaccattcaaattagtgggagcaagtagtcgtgttcgtgatgtgatagactgtgggtactgtggtgaatgttctactggttttaagtacgcatctcaaagagggtgggagatagatgtacattgtggttctctttctgagccgttcgttcataatggccatttgcatccactatattttgattctaaggaaaatcactcttgcaatgcatgccataaggtaacggttcatatgctttgttgcaatgcttgtgactttgatttgtgtttaagttgcgctagtttgccattaaagataaggcatagaaacgatgagcaccctctcactctatcttgtggtgaaacggcgaatggaaagtattggtgcgatatatgcgagacagagttagatccaagtaaatggttctatacaagctttgattgtggagtcacattgcatgtggaatgcgtactaggagatttctcacgtctcatgccaggacgcatggttgatactgttgggggaaagaaattttatgtggttcttaacaatcacaacactcgaccattatgcagcatgtgtcgctctcgatgcaaggtctccgtcatcttaaaagcttgtgatgaagacaatgtatacatatgttctcgttcatgtttttctgatatggtttcagctagatcatgttga

SEQ ID NO: 1274 - protein, 651 aa, Arabidopsis thaliana
MDTGAVKLPIHEHPIFPSARIVFSTCKGCGVEDFVYGGYVCNDSDCKARFHKECAEAPSEISHSFHQQHPLFLTNGLGDLPCDLCGQKRLEAAGYSCPTCEFKLDLTCGINPSPPAIEHPICHDHPLVFLKKREEKAPCEVCKDSIGGPSYSCLGCDLYFHVDCVHLSKEVNHPCHPSHPLKLIASESLTDNAEKICLLCEQQPENMLYYCSVCNFTSCLGCTKRPPPLFIEHTKTHKHQLTLFLNGISYQGSALTYNSRAYMCLPCGFVVNGNGINLPQVININRHDHRISYTHQLGPGYLNCGVCREIVDRDCGAYACVVCSNYAVHWECAVHDNVWDGVELEGTSEITEDIAPFKVMGDNLISHFSHEQHTLRLHKEGIIHDAYALCEACTYPIGFDPIYSCEECHFILHEKCANLPMKKRLVFATTPFKLVGASSRVRDVIDCGYCGECSTGFKYASQRGWEIDVHCGSLSEPFVHNGHLHPLYFDSKENHSCNACHKVTVHMLCCNACDFDLCLSCASLPLKIRHRNDEHPLTLSCGETANGKYWCDICETELDPSKWFYTSFDCGVTLHVECVLGDFSRLMPGRMVDTVGGKKFYVVLNNHNTRPLCSMCRSRCKVSVILKACDEDNVYICSRSCFSDMVSARSC

SEQ ID NO: 1275 - DNA, 2178 bp, Arabidopsis thaliana
  CDS (1)..(2178)
atggaaccaccacctcctcatttttctagagctaaacctccatgtcgtctgtccgatccggctcagccccacaagctttgccgacggcgacgaccatcttatcctccactttccatctgctttacgtgcaaaggcaagcaattgaggtccagtgcatactattactattgtgctacttgcaatttggaattccacagaggttgtcacatctttctgccggtgataagaagctcttttcacccctctcaccctctcaccttcttctcctcagatcctaaatttgatgtatctataatacctaaatattggagagacagctccgctacagaagaatcttcagatgaatcgataaaccaactaactattgagtatcttggagacgttagtgatgatgacggcgaggacagccattctgatcacgatcttggtgctagtgaagatgacggcgaggacagccattctgatcacgatcttggtgctagtgacgatgacggcgaggacagccattctgatcacgatcttggtgctagagacgatgatgggaatggcaatggcgctggcgatgttcatgctgatggtgaggcctctttatccgatggaaatcacctaaaatgcaaatgttgtggggttcctttacaaatgacatattatcattgttctatctgcaagttcaatcttaacttggattgctcgatgagacaaccacctcccattatctcacacttgaaaagtcatgagcacaccctaaccctcttccctatacgactccctttgccatgtgatgcttgtggcttgtctctaaacgacaccgaagatctggtttactcttgtctaccttgcagccgtatggtccacagatcatgtatctatcttcctcgtgtcattaagatcacccgacaccaacatcgtctctctcacacttcctcccttcaacctggtgatttctcttgtggagtttgtcgccaaacagttgacgtcaactacgggcaatactcttgtaataaggaatgtcattatgctgtccattccaaatgtgcaacaaggaatgacgtgtgggatggaaaagatcttgatggagtgcctgaagaacccgatgagtttatcgaaccgccattcctgaagattgatgaggagacaattcaacatttcagtcatcaccattatctgaagctccatgaaaagaaaaccatttacaagagagacaagttttgtgaggcatgcacccttccagtaatgatctcccagagattttatggttgtatgcagtgtgattttgttcttgacgaaacgtgtgcttctcttcctcgcaagaaaaaccacccactacataaacacccacttaaccttcacactttgcctcttggtgagtctgccatgatcaataaaggtgctactagcaaagacatattcaaatgtattggttgcggccgaattggctgtggtttctactacaaatgcgatgaaaaaaattgtgatgagtttctcctagacgtcagatgtgcttcccttccagatccttttgttcatgactgtcatccccatgatcatcctctcttctttaacttgaccaaaggtaattgcatggggtgtggttctgatagctgctcatcctatttcttggaatgtattaaatgtaagtcttttttgggaattaaatgtgctactctgccttgtgaggcccattacacacacgataggcatccactcactctttgttacgaagaagaagaagatactacaagtgggcaatattggtgtgagatatgtgaattcaaattggatccaaagacatggttttatacatgcgactactgtatgatcactctccatgtcaactgtttactggggaaagatatctatctgaagccctgccacattttcaaagtaggtcttttttataaggaagttgaaattgctcggaatgatggtaattctcggctgttttgctatatatgtcgacttcgctgtggacagactttggtattcaagtggctaggtagacgcaaaagcttttgtactcttcgatgtatcggaaagtatgtgaaagacacgcgcgggtattatgatgcagttgcaatgggatattttgaatcttatccaacgaatctagttacatccccagaagcttccgattcatcagttattaagagtgcttttgatttcctatttagagattga

SEQ ID NO: 1276 - protein, 725 aa, Arabidopsis thaliana
MEPPPPHFSRAKPPCRLSDPAQPHKLCRRRRPSYPPLSICFTCKGKQLRSSAYYYYCATCNLEFHRGCHIFLPVIRSSFHPSHPLTFFSSDPKFDVSIIPKYWRDSSATEESSDESINQLTIEYLGDVSDDDGEDSHSDHDLGASEDDGEDSHSDHDLGASDDDGEDSHSDHDLGARDDDGNGNGAGDVHADGEASLSDGNHLKCKCCGVPLQMTYYHCSICKFNLNLDCSMRQPPPIISHLKSHEHTLTLFPIRLPLPCDACGLSLNDTEDLVYSCLPCSRMVHRSCIYLPRVIKITRHQHRLSHTSSLQPGDFSCGVCRQTVDVNYGQYSCNKECHYAVHSKCATRNDVWDGKDLDGVPEEPDEFIEPPFLKIDEETIQHFSHHHYLKLHEKKTIYKRDKFCEACTLPVMISQRFYGCMQCDFVLDETCASLPRKKNHPLHKHPLNLHTLPLGESAMINKGATSKDIFKCIGCGRIGCGFYYKCDEKNCDEFLLDVRCASLPDPFVHDCHPHDHPLFFNLTKGNCMGCGSDSCSSYFLECIKCKSFLGIKCATLPCEAHYTHDRHPLTLCYEEEEDTTSGQYWCEICEFKLDPKTWFYTCDYCMITLHVNCLLGKDIYLKPCHIFKVGLFYKEVEIARNDGNSRLFCYICRLRCGQTLVFKWLGRRKSFCTLRCIGKYVKDTRGYYDAVAMGYFESYPTNLVTSPEASDSSVIKSAFDFLFRD

SEQ ID NO: 1277 - DNA, 1995 bp, Arabidopsis thaliana
  CDS (1)..(1995)
atggatctaccacccaaaatactaccaactcacaaatatcctttgaccatttcgactcgttttgttaatgattcttgtaaaggttgcaatataaaaggtcccatctatggcggctaccgttgcaacgagccttcctctactagtttgttcttccacaaagagtgcgcagaggctccaccggagattatcaaccatccttctcatcctcaacacactcttaaactccacaattctctaaggaacccatgtaaatgtaatctatgtggcaagacttttttcgcttttggttatcgttgttcatcaaaatgtgacttcatcgtggatctcacttgtgggataaatccattgccggtttctatcgaacatccaaagtctcatcatcatccagttatcttcttgaaagaacccgcaaagccgggtaggcgcagatgcggaatttgcaagggctataatggtggatgttcttatgcatgtcttgaatgtgaagtccactttcatgtcgagtgtgtcaatctttcccaagaggtgaatcatccttctcatcctcaacattctctcaagttacttgaatatgaatcactaacaagtgatgctgaagagacatgtcttttatgtggagaacgaccagacaaagtgctttatcgctgctcgatatgcaacttcagcgtatgtcgattctgtacaaaagatccaccaccacttgctatcgagcatcataagacgcacgagcatcgacttgtcctcttatcaagactcatctcatttgaatgtaatgcttgtgggatgcaaggtgatcgaagtccttacatgtgtgttcaatgcgggtttgttgtccatagaacttgtattgacttaccacgtgtcataaacatcaaccgtcacgatcatcgcatctctttcacccatcatctcggtgttgggtactcgagatgcggtatttgtcgcaaagatataagtcaataccatggggcttatttatgccctcgttgcccgaactatgcagctcattcactatgtgcaacaagaaaagacgtatgggatggggtagaactcgaagggacaccagatgatgatgacgaagatattgtgccgttcaaagtggtgggtgataacttgatcaagcatttcagtcatgaagaacataatctaagactcaacaaggacaatatcaatcgtgacgaaggctcacgttgtgaagcatgcgtccttcctatctattccgatccgatctacaactgtgaggaatgtcgtttcattctccatgagaaatgcgctaatcatccaaaaaagaaacgacatgtattccacacaaaaccattcacactatggtccagaccacctcgtacattccatagcaaagattttagattctacgatgtctttcgctgctatgcttgtagaacgaagtctactggtttcaggtacgtttctgattggtgggttctagatgtacgttgtggttcgcgttctgaaccggtcattcatgatggtcacagacatcctctatattacgaacataagaaagatcactgttgtgatgcatgttataaagagatagatggttatctgctttcctgtgacacttgtgactttgatctggatttacactgtactgatttaccaaaaacggtaaagcacagctgcgacaatcatcctctttccctatgctatggcgaaaatgcaaccggaaaatattggtgtgatatttgcgaggcggaaacagatccaagtaagtggttctacacttgctctaaatgtgtggttactgcacatattgaatgtgtgcttggagacttttcacgtctcatgccaggacgcatcatcaactacaataatgttagagttgaagtggttcttaacagctatagttctcgccccttctgtgcaaaatgtcactccagatgcagagctcctatcattctaaagctttgtgatccatatactggatacatttgttccgatgcatgtgtagtgcccgactatcaatacagctaa

SEQ ID NO: 1278 - protein, 664 aa, Arabidopsis thaliana
MDLPPKILPTHKYPLTISTRFVNDSCKGCNIKGPIYGGYRCNEPSSTSLFFHKECAEAPPEIINHPSHPQHTLKLHNSLRNPCKCNLCGKTFFAFGYRCSSKCDFIVDLTCGINPLPVSIEHPKSHHHPVIFLKEPAKPGRRRCGICKGYNGGCSYACLECEVHFHVECVNLSQEVNHPSHPQHSLKLLEYESLTSDAEETCLLCGERPDKVLYRCSICNFSVCRFCTKDPPPLAIEHHKTHEHRLVLLSRLISFECNACGMQGDRSPYMCVQCGFVVHRTCIDLPRVININRHDHRISFTHHLGVGYSRCGICRKDISQYHGAYLCPRCPNYAAHSLCATRKDVWDGVELEGTPDDDDEDIVPFKVVGDNLIKHFSHEEHNLRLNKDNINRDEGSRCEACVLPIYSDPIYNCEECRFILHEKCANHPKKKRHVFHTKPFTLWSRPPRTFHSKDFRFYDVFRCYACRTKSTGFRYVSDWWVLDVRCGSRSEPVIHDGHRHPLYYEHKKDHCCDACYKEIDGYLLSCDTCDFDLDLHCTDLPKTVKHSCDNHPLSLCYGENATGKYWCDICEAETDPSKWFYTCSKCVVTAHIECVLGDFSRLMPGRIINYNNVRVEVVLNSYSSRPFCAKCHSRCRAPIILKLCDPYTGYICSDACVVPDYQYS

SEQ ID NO: 1279 - DNA, 2127 bp, Arabidopsis thaliana
  CDS (1)..(2127)
atggacatgaaagaagtgcctccacctcctccaccttctggattcaaacgatataagaaaaaaagaagcaaaaagatggacaacaaagaagtgcctccacctcctcctcctcctcctccacctgttctgcctcatatccgatcaagaaaaaagatggacatcaaagaagtgcatctacctcttccacgtcactatcctcctcctcctccgcctcttccgcctcctccgccttatggattcagacgacatcataaccaaagcggcaacgagcttgagaaacgaatagcacgtctaggctttccaactcttcgcccttttcaatccaaacgatatgataaccaaacccttccaaacccaagatgtcctctgtctaatccaacctacccccacacactcaatcctaagttcagcgtaaacactacaaatggttgttttacatgcggtgaaaacacatccccctggattgaccaccataatgtccatttcttctgcaagaggtgccatgtcgagttccactttggttgccacacgtaccctagtgagttaacacatccttatcacctccaacaccctcttattttcacatttcataactatcaaactggggtcatatcagacgccaggatagatgaatccttttgcactacagttttgtctggctccgatcctaagaagtctggctctatagataaatgttcatggtgtggaaaaaatatccaagggaattggttctatcgttgttctatatgcaaattttgtttggatctctcttgctcccaaactgatccacctctgctcgttgcaaacccaaagagtcatcaccattcactcgtattctatgctcgaccactcttgactccgtgtgatgcttgtgggtcggtcaatgtgttggatccaagttatgcttgctttcaatgtaactacatggtccatcaaagttgcatcgacttaccacgagtcataaagatcactcgtcaccagcatcgtctttttcatactccttacctccattccacgattccaccatgtcggatctgctacaaaccagttgacatcaagtacggtcagtattcttgcaaacacgaggatttctcttacgttgtccattccaaatgtgcaacacatgagaatgtatgggatgggaaagaactcgaagaggaaccagaagaacccgacaacattgaagatatcgtcccatttgagaaggttagtaatgatatgatcaagcatttctctcatgaacatcatcttctgaagctagaaaagtatgaccgtgttcgagatgcagagaagcaatgccaagcatgcatccttcctatcaactctcacgacttcttctataactgcatggaatgtgattttttcctccacgaggtatgtgctggtctacttagaaaattggatcatgcgttgcacgttcaccctcttgtcctagacccttctcctcaacgacactataatcaaaatggttgtttgggttgttcgagaaaatctactggtttcaggtacaagtgctccatagagaaatgtgtgcttctcgataacgttcagatagatgttagatgtatcttagttccagattttttcacccatacagctcatgaacatcccctatttatatccacatccgagaaagggaaaagtaagatttgttgcgaggcttgcaaggagatatgtcttgtgtcctacctacagtgttctgaatgcaaatttgctatgtgttatcagtgcgctaccattccaaacgaagtctactacaaatacgacaagcattttctctccctttgctacggagaagtagtgtttggtacgtattggtgtgaagtatgtgagaaagaggtagatccaagggattggttttacgcatgcaacaaatgttgtatcactgtccatcttcaatgtgtattcggatcctctggttatgtgaagcctggtttcacattatatcattacttcacaaaaatggaagttttaagcaacagtaagagcactcgaccgttttgcactgaatgtggtcaacgttgtccaagttccgtctactacaaacttggttggttgggaactagtactttttgttcgttgaattgcttaacgtcaaaagaaaaattgatggtgttgtcaacatga

SEQ ID NO: 1280 - protein, 708 aa, Arabidopsis thaliana
MDMKEVPPPPPPSGFKRYKKKRSKKMDNKEVPPPPPPPPPPVLPHIRSRKKMDIKEVHLPLPRHYPPPPPPLPPPPPYGFRRHHNQSGNELEKRIARLGFPTLRPFQSKRYDNQTLPNPRCPLSNPTYPHTLNPKFSVNTTNGCFTCGENTSPWIDHHNVHFFCKRCHVEFHFGCHTYPSELTHPYHLQHPLIFTFHNYQTGVISDARIDESFCTTVLSGSDPKKSGSIDKCSWCGKNIQGNWFYRCSICKFCLDLSCSQTDPPLLVANPKSHHHSLVFYARPLLTPCDACGSVNVLDPSYACFQCNYMVHQSCIDLPRVIKITRHQHRLFHTPYLHSTIPPCRICYKPVDIKYGQYSCKHEDFSYVVHSKCATHENVWDGKELEEEPEEPDNIEDIVPFEKVSNDMIKHFSHEHHLLKLEKYDRVRDAEKQCQACILPINSHDFFYNCMECDFFLHEVCAGLLRKLDHALHVHPLVLDPSPQRHYNQNGCLGCSRKSTGFRYKCSIEKCVLLDNVQIDVRCILVPDFFTHTAHEHPLFISTSEKGKSKICCEACKEICLVSYLQCSECKFAMCYQCATIPNEVYYKYDKHFLSLCYGEVVFGTYWCEVCEKEVDPRDWFYACNKCCITVHLQCVFGSSGYVKPGFTLYHYFTKMEVLSNSKSTRPFCTECGQRCPSSVYYKLGWLGTSTFCSLNCLTSKEKLMVLST

SEQ ID NO: 1281 - DNA, 2301 bp, Arabidopsis thaliana
  CDS (1)..(2301)
atgccgaaaaaagaagtacctccacttcctccacttattggatttggacgataccgtaaccggtacggcaaaaagatggacaaagaagaagaagaggaagaagacgttgctccacctcagccacctcttggatataaaggatgccgtaaccaatgcagcgcaaagatgaacaaggaaaaagtatccccacctcctacacctcttggattcagacgacaccataaccaaaacagcgcaaagaaggaccaagaagaagtgtctcaagttcctctgcctcttgaatgtagacgatatcataaccaaaccggcaacaagatggacaaagaaaaagtaccttctccacctccttcagctcgtagattcaaacgatctcgtaaccaaagaagcaaaaatatggacaaagaagtaccttcaactactccagctccccgtccccgtagattcaaacgacatcaaaaccaaaacggcaaagaaatggacaaaaaaatagtacttctagcttctcaccattttcctaccgaaaacccaagatgtcctgtgtctcatccagctcaacctcacagcctctctcctagattcggtggaaacaccaagtttggctgtttttcttgcggtgaaaatacatctcccatgactgaagaccagatctaccatttctcctgcaccacttgcgatgtggagttccacagtggtcattgtttacggtttccgaggaagttgacgcatccttatcacctccaacatcctcttacgttcaccttccggaacgatgaaaccgggatcacatctgatggcattatagatgaatctttttgcactacagttttctctgactccaacacgtctgatcctaagaagttaggatctaccgaatctgatcattgcacatggtgtggaaaaagtatacaaggaagttggtcctaccgttgttctatatgcaacttttgtttggatctatcttgctctcaaaacattccacttctcctcgtcccgaacccaaagagtcatcagcatccactcgtcttctaccggcgaccactcttgactccatgtgatgcttgtgggttgatcaatatgttggatccaagctatgcttgttttcaatgtaattacatggtccatcaaagttgcatcaacttaccacgagtcataaagatcacgcgtcaccagcatcgtctttttcacacaccttgcctccaatctaagatttcactatgtcgggtatgctatcaaaaagttgacaccaactacggccaatattcttgctaccacgaggtttgctcttatgtagtgcattcgaaatgtgcaacgaatgagaacgtatgggatgcgaaagaactcgaatgggaatccgaggaatccgaggaaattgaagatatactcccattgaagaaggttggttgtggtcaaataaagcacttctctcataaacatcctctaaagctcaagaagtacaatggtgttagagatgcagagaagcaatgtcaagcatgcatccttcctatcaactctagtgatttctacaattgcagacactgtgacttttttctccacgaggtatgtgctggtcttcttcgaaaactgagtcatgcgttacacaaacaccctcttatcctaatcacctctcctcgaaaccactatgatctcatcgattgttcagcttgttccagaaagtccactggtttcaggtacatatgtccggaaaaaaagtgtgtgtccaaacaagttcagatagatgttcgatgtatctcatcagttcccgaatatttcacccataaaagtcataaacatcctctatttatctccacgtcctccaaaggtgaaaacaagacttattgcgtgggttgcaagaagataggtatgcggtcttacctacaatgtaccatatgcaaatttgctctgtgttatcaatgcgctacaattccaacggaagtaagctacaaatacgacaagcaccctctttctctatgctatggagaaaaggcagatgagacgtactggtgtgaactatgtgagaaaaaggttaatccaagggattggttctacacatgcaacgaatgttgtatcactatccaccttcattgcttatttggatcttcttcttatatgaagcctggttttagattcaagtattactcgtccaaagtggaagttcgtcgcaacagtgtcactcgaccgaattgcgttgaatgtggtcatcgttgtccaggttacatctactacaaaaacgataactctgtaacggttacttgttctttgcattgtttcgagaaaaagttgataccgctgcaaacatggtga

SEQ ID NO: 1282 - protein, 766 aa, Arabidopsis thaliana
MPKKEVPPLPPLIGFGRYRNRYGKKMDKEEEEEEDVAPPQPPLGYKGCRNQCSAKMNKEKVSPPPTPLGFRRHHNQNSAKKDQEEVSQVPLPLECRRYHNQTGNKMDKEKVPSPPPSARRFKRSRNQRSKNMDKEVPSTTPAPRPRRFKRHQNQNGKEMDKKIVLLASHHFPTENPRCPVSHPAQPHSLSPRFGGNTKFGCFSCGENTSPMTEDQIYHFSCTTCDVEFHSGHCLRFPRKLTHPYHLQHPLTFTFRNDETGITSDGIIDESFCTTVFSDSNTSDPKKLGSTESDHCTWCGKSIQGSWSYRCSICNFCLDLSCSQNIPLLLVPNPKSHQHPLVFYRRPLLTPCDACGLINMLDPSYACFQCNYMVHQSCINLPRVIKITRHQHRLFHTPCLQSKISLCRVCYQKVDTNYGQYSCYHEVCSYVVHSKCATNENVWDAKELEWESEESEEIEDILPLKKVGCGQIKHFSHKHPLKLKKYNGVRDAEKQCQACILPINSSDFYNCRHCDFFLHEVCAGLLRKLSHALHKHPLILITSPRNHYDLIDCSACSRKSTGFRYICPEKKCVSKQVQIDVRCISSVPEYFTHKSHKHPLFISTSSKGENKTYCVGCKKIGMRSYLQCTICKFALCYQCATIPTEVSYKYDKHPLSLCYGEKADETYWCELCEKKVNPRDWFYTCNECCITIHLHCLFGSSSYMKPGFRFKYYSSKVEVRRNSVTRPNCVECGHRCPGYIYYKNDNSVTVTCSLHCFEKKLIPLQTW

SEQ ID NO: 1283 - DNA, 1608 bp, Arabidopsis thaliana
  CDS (1)..(1608)
atggaaataattgagggtccaaaagcacatgagcatcctttattccttcttccaaagatgactatgtttacttgtcatttatgtgggctgcaagatgaccggttcccttatgcatgtaacttatgcaatttgagttttcacaaagattgtgccgaatccacaccagagatgaagtattcttgtcatcctaaacacattctcaagcgtctcacacgtgttccaaggtacacagatggaaaatgttgtttgtgtgaaaacaaacttcattacatattttatcattgttctatttgcaatttcagtgtggatatcaattgtgcaaagaatccacttccttccactattgttcaccttaaggctcatgagcatttactcacccttatgcctcaacggaattttgtttgtgatgcttgtggaatggatgacgacccaaatccatatgtatgtcttccatgtaatttcatgatccatcaaaattgtattgataaaccaagcatcataaagatttatcgtcatgatcatcgtctttattacaatcattgccttgacgctggagattggaaatgtggagtgtgtaataaagagataaactggacatgtggggcttattcttgttcaaagtgtcctgattttgccattcatccaagatgtgtcaaaaggtttggcatttgggatgggattgaactcgaaggaataccagaaaataatgtagaggtaaagtcatacgaggtgatagaagaaggagaaataaggcattttagtcacgagaagcataatttaaagcttcaagaagaaagtgatgctaataatgaatgcatgttgtgtaaagcatgcaattatcctatatattctaactcattctacagttgcatggaatgtgatgatttcatccttcataaaaaatgtgctgacctcccaaaaaagaaaatagatcccttctacaacatgttgactactttaatcacaaatgatattcgcataagcatttgcaatgcttgtcaaaacgtttctcaaggttttacttacgtaagtgatgatcataagattatcttggatgtgcgatgcggttctatttcggaaccttttgtccatgaaagtcatcctcttcattcgttatacatcagccgctcaacagaagaaaagttttgtattgcttgcggagataaggctactatggttttgagttgcgaggagtgtgactttattttagacattaaatgttctaatttgccaaagatggttaaacacaaaaatgataaagaccatttgttgtccctatgttacggagaaaaaacaagtgagcagtactggtgcgagatatgcgaggaagcactaaacgcaaagaaatggttttattcatgtgatgattgtgacattacttttcatatcaaatgtacgcttggagacttcgtagggatgtatcaggaagctaaggatgagtcattccaaacttatatgattcttaataatcatataaatcgaccagtttgttgctgttgtgagtctcgctgtcaattctcttccatcttaaggttttatggaaaattaatatgttctctacaatgtttgcaaaagaagttccaagaattacatgatgatatatcctga

SEQ ID NO: 1284 - protein, 535 aa, Arabidopsis thaliana
MEIIEGPKAHEHPLFLLPKMTMFTCHLCGLQDDRFPYACNLCNLSFHKDCAESTPEMKYSCHPKHILKRLTRVPRYTDGKCCLCENKLHYIFYHCSICNFSVDINCAKNPLPSTIVHLKAHEHLLTLMPQRNFVCDACGMDDDPNPYVCLPCNFMIHQNCIDKPSIIKIYRHDHRLYYNHCLDAGDWKCGVCNKEINWTCGAYSCSKCPDFAIHPRCVKRFGIWDGIELEGIPENNVEVKSYEVIEEGEIRHFSHEKHNLKLQEESDANNECMLCKACNYPIYSNSFYSCMECDDFILHKKCADLPKKKIDPFYNMLTTLITNDIRISICNACQNVSQGFTYVSDDHKIILDVRCGSISEPFVHESHPLHSLYISRSTEEKFCIACGDKATMVLSCEECDFILDIKCSNLPKMVKHKNDKDHLLSLCYGEKTSEQYWCEICEEALNAKKWFYSCDDCDITFHIKCTLGDFVGMYQEAKDESFQTYMILNNHINRPVCCCCESRCQFSSILRFYGKLICSLQCLQKKFQELHDDIS

SEQ ID NO: 1285 - DNA, 1524 bp, Arabidopsis thaliana
  CDS (1)..(1524)
atggacttgttcggagaatttcataagggagaaatcgatgggaaaccatatcttctgtaccacaacgtaatgaaaccatcaacacaaacacacacctcaaactcctccgctgaaaaaaccaccatccaaaaaccattatcactccaaaacaaaacaaactcctccgatgaagtaaccatcggtgacggagacaacctccctatttcacctattttcatctgccttaatttacgattgcaaaaatcagcgaggattcagaatattgcattaggggatgaagacgggaaagccttacgtgataaatttttcaagctcgagacttcccctctccaaggccatggtgacaatatatcggatgatcatgtcgtactccctcttttttggtgcaacaacaaagaagctgatccaaagatggattgcaatatttgcagagtgcaaaaggcaggcacaaactattattactgtgtcgagtgtgatgtaacgtaccataaagaatgtatcgagtctccacttgagatcagttatcctacccacgccaaacatactctccaactttgcttttcatctctgcgaggagttcatcagtgcatcatctgcaaaaacagagcagatcttatcatttattattgtgctctgtgtgacatttatatgcatgcggtttgtgctcaggcggcaatacccttttttatagaccaaccaaaaaggcatgatcataccctctctcttttccctagacaagcttccttaacctgcaatgtttgtgctttggtcaataaactccatctcacctacgtttgtcgttctatatgcgatttcgtagcccatagtgattgcatccatgtcccacaaaccataagaatatctcgtcaccaccatcgtgtctcttttacttcttctcttccattagaaaaatggtcttgtggagtttgtcgtcgtgaggttgaccatgattatggtgcatacacttgttgtgtgtgtagtggctacgctgttcacacaagatgtgcattgcgcacagatatatgggatggcattgaactcgagggagtgcaagaagatgaagatgttgagcctccgttcaaagggatagctggtggaacaatacttcacttttctcatggttgtcaactggaatttaagacaagtgaagtttacgaccaagaaaagttttgtcaagcatgtgcccttccaatctacgagaagaatttttatgaatgtgtagaatgtgacttcatcctacatgaaagatgtgtagaggctccccgtaagaaggtccatccattacatccccatccacttatacaaaagtttactcacgtagaaggcggcttctcatgtcaggcgtgtaatcgcatgagtaatagttttggatatgagtgtctcatggaagattgtggctacaatctagatgtagtgtgtgcctctatttctgagccgtttgattatcaaggccatcaccaccccttatttctgtctttagaccccaaagaagagccaatctgccacatttgcaggtcaacataa

SEQ ID NO: 1286 - protein, 507 aa, Arabidopsis thaliana
MDLFGEFHKGEIDGKPYLLYHNVMKPSTQTHTSNSSAEKTTIQKPLSLQNKTNSSDEVTIGDGDNLPISPIFICLNLRLQKSARIQNIALGDEDGKALRDKFFKLETSPLQGHGDNISDDHVVLPLFWCNNKEADPKMDCNICRVQKAGTNYYYCVECDVTYHKECIESPLEISYPTHAKHTLQLCFSSLRGVHQCIICKNRADLIIYYCALCDIYMHAVCAQAAIPFFIDQPKRHDHTLSLFPRQASLTCNVCALVNKLHLTYVCRSICDFVAHSDCIHVPQTIRISRHHHRVSFTSSLPLEKWSCGVCRREVDHDYGAYTCCVCSGYAVHTRCALRTDIWDGIELEGVQEDEDVEPPFKGIAGGTILHFSHGCQLEFKTSEVYDQEKFCQACALPIYEKNFYECVECDFILHERCVEAPRKKVHPLHPHPLIQKFTHVEGGFSCQACNRMSNSFGYECLMEDCGYNLDVVCASISEPFDYQGHHHPLFLSLDPKEEPICHICRST

SEQ ID NO: 1287 - DNA, 1854 bp, Arabidopsis thaliana
  CDS (1)..(1854)
atggacttattcggagaatttcataaggtggaaatcaatgggaaactatttctcgtataccacaacgttataaaaccattaccaaacataaacaatccattgattccgtctacgatctccctcctcagcctcttttcttatgccctcaactccgaaccgaaatattatcaattgatatcgataatgcgagggttgcacaatacttcccctctctttgatgacactagtgacggtcatcatgtactccctctgttttggtgcaacaacaaagaagtcgatccagaagcagtagacggcgatgagtgctattcttgctctttccaatccatcggtacagactattatttctgtgacaagtgtgataaaaggttccataaagaatgcgtcgagtgtccacttgagattagttatcctacccacaccaaacattctctccaactcttctattctaaatatagatctgacctctgcatctactgtagagaaagagcaacctatctgatttatttttgtgctctttgcgatagttatatgcatgtcttttgtgctcagatgaaaatacctttttttatagaccaaccaaaaagacatgaccataccctcaccctttttcctagacaagcttccttaacctgcaatatttgtggtttggtaaataaacttcatctcacctacatttgccctatatgcgatttcgtagcccatagtgattgtatctatatcccacaaaccataagaatatctcgtcaccaccatcgtgtgtcttttatttcttcccttccttttgaagaaaagtcttgcggagtttgtcgtcaaatgcttgacagtgattatggtgcatatatttgcaaagggtgtagtggctttgtcgctcacataagatgtgcactacgtagtgatatatgggatggaaaagaacttgaaggagtaccagaagaagtagaagaagatgacgttgaatccttcaagaggatagctgatggagtaatactccatttttctcatcgccatcatctgtattttgagataagtggagtttacaatggaaacaagttttgtcaagcttgtgcccttccagtcaatgaagggaatttgtatgtatgtgtgggatgtgatttcatcctacacgaaacatgtgcagatgctccacgtagaaaggtccatccattacatccccatccccttaaactaattttttatgaagacaattgcttccactgcaaagcttgttggcgtacgagtactgcttttggatataggtgtatcaaccacaattgcaagtacatgatagatatagtgtgtgcctcgactgctgagccgtttgattatcaaggccatcgacatcccttattcttatcgttagacccaaaagagaagccaatgtgccacatttgcaggtcaacaaaagataagaaggtacttaactgcattgaatgtgactttattgtatgtttcgaatgcgccaccttaccatacatgataaggtataagcatgatgaacattacctcacattttgtcatggagatgaggcaagtgactcagattggtgtgaattatgtgagggaaagttagcaattggaggaaaagaaggattctatgagtgcaaagattgttgtacgacacttcatattaattgcttacttggcccagatccatatcttatggttggtcaaaggctcccagttcctaacggtgagattttttttcgacacaacaattatactactcggcctttttgctcgatatgcaatattcgttgtccgtatccaacatttgtttcatacataaaggatatgtttatatcttatattctatgttctagtaagcacttgaagacgagataccatcattga

SEQ ID NO: 1288 - protein, 617 aa, Arabidopsis thaliana
MDLFGEFHKVEINGKLFLVYHNVIKPLPNINNPLIPSTISLLSLFSYALNSEPKYYQLISIMRGLHNTSPLFDDTSDGHHVLPLFWCNNKEVDPEAVDGDECYSCSFQSIGTDYYFCDKCDKRFHKECVECPLEISYPTHTKHSLQLFYSKYRSDLCIYCRERATYLIYFCALCDSYMHVFCAQMKIPFFIDQPKRHDHTLTLFPRQASLTCNICGLVNKLHLTYICPICDFVAHSDCIYIPQTIRISRHHHRVSFISSLPFEEKSCGVCRQMLDSDYGAYICKGCSGFVAHIRCALRSDIWDGKELEGVPEEVEEDDVESFKRIADGVILHFSHRHHLYFEISGVYNGNKFCQACALPVNEGNLYVCVGCDFILHETCADAPRRKVHPLHPHPLKLIFYEDNCFHCKACWRTSTAFGYRCINHNCKYMIDIVCASTAEPFDYQGHRHPLFLSLDPKEKPMCHICRSTKDKKVLNCIECDFIVCFECATLPYMIRYKHDEHYLTFCHGDEASDSDWCELCEGKLAIGGKEGFYECKDCCTTLHINCLLGPDPYLMVGQRLPVPNGEIFFRHNNYTTRPFCSICNIRCPYPTFVSYIKDMFISYILCSSKHLKTRYHH

SEQ ID NO: 1289 - DNA, 1908 bp, Arabidopsis thaliana
  CDS (1)..(1908)
atggacttcttcggagaatttcagaagagagaaatcgaggggaaaccatatctcccacaaatacaaaccccaaactcctctgatgaaaaaaccaccatcgataatccattatcaatccaaaatttaaactccatagccattgattccggcgacaatctccctcttgcacctcttttcatatgccctgatttacgatatcgattaacagcgactgtcgataatattacagtctcgggtgaagatgggggtatattacttgacctctttttcaagctcaagacttcccctctccatggtgacagtacgtcatattatcatgtcgtactccctctgttttggtgcaacaataaagaagctgatccagacatggattgcggtttttgcgaaggcgataaggtcggtacatgctattattactgtgtcacgtgtgatgaaaggtaccacaaagaatgtgttgagtctccacttgagatcacttatccttcccaccctcaacattctctccaaatttacctttctacaaaaccatttgagcattgcatcttgtgctcaagaaaggcacataatattatttattattgtgatgtctgtgatatttacatgcatgtgctttgtgctcaggcgacaataccctttttcatagaccaaccaaaaaggcatgatcatacactcacccttttccctagacaagcttccttaacctgcaatgtttgtggtttagttaataaacttcatctcacctacgtctgctccatatgcaattttgcagcccatagtgattgtatccatatcccacaaaccataagaatgtctcgccacgaccatcgtatctctttcacttcttctcttccattaggaatatggtcttgtggagtttgccgcaaagagattgatggtgattatggtgcatatatttgcaatatttgtagcggctacgctgttcacacaagatgtgcattgcgactcgatatatgggatggcattgatctcgaaggagtaccagaagaagatgaagaagttgagccattcgagaggatatcagatggaataatactccatttttctcatggttgtcaattgaaacttacgacctatgaagttaacggcgaagaaaagttttgtcaagcgtgtgtccttccaatcaatgagaagaatttgtatgtatgtgtggaatgtggcttcatcctacatgaaacatgtgcagatgctccccgcaagaagttccatccattgcatccccatccacttaaacaaagagttgctacagctgaccttgaacgtggattctcctatcttgcatgtaagcgcctaagtaatagtttcagatatgagtgtgacaaagagggttgtgactgcgttcttgatgtagtatgtgcttcggtttctgagccgtttgattatcaaggtcatccacaccccttatttctagctttagaccccaaagaaaagccaatttgcaacatttgcaagtcaaccaaggttcataaactattgaactgcattgaagtcgagtgcaattttgttatatgttttacgtgtgccaccttaccatacatggtaaggtataagcatgatgaacattacctcacattttgtcgtggagatgaggcaggtggctcagactggtgtgagttatgcgaaggaaaattagcaattggaggaaaagaagggttctataagtgcacttattgttgtaccacgcttcatattaattgcttgcttggtccagatccatatttgaagcctgatcaaactatcccaacggatcaaattgaggtggttttacaacgcaacaattctgcatctcgtcaaatttgcagcaaatgcaatattcgttgtccgtatccaacatttgcagtatacacaaaggaaatggtttctcatattaggtgtgctctaacatgttaa

SEQ ID NO: 1290 - protein, 635 aa, Arabidopsis thaliana
MDFFGEFQKREIEGKPYLPQIQTPNSSDEKTTIDNPLSIQNLNSIAIDSGDNLPLAPLFICPDLRYRLTATVDNITVSGEDGGILLDLFFKLKTSPLHGDSTSYYHVVLPLFWCNNKEADPDMDCGFCEGDKVGTCYYYCVTCDERYHKECVESPLEITYPSHPQHSLQIYLSTKPFEHCILCSRKAHNIIYYCDVCDIYMHVLCAQATIPFFIDQPKRHDHTLTLFPRQASLTCNVCGLVNKLHLTYVCSICNFAAHSDCIHIPQTIRMSRHDHRISFTSSLPLGIWSCGVCRKEIDGDYGAYICNICSGYAVHTRCALRLDIWDGIDLEGVPEEDEEVEPFERISDGIILHFSHGCQLKLTTYEVNGEEKFCQACVLPINEKNLYVCVECGFILHETCADAPRKKFHPLHPHPLKQRVATADLERGFSYLACKRLSNSFRYECDKEGCDCVLDVVCASVSEPFDYQGHPHPLFLALDPKEKPICNICKSTKVHKLLNCIEVECNFVICFTCATLPYMVRYKHDEHYLTFCRGDEAGGSDWCELCEGKLAIGGKEGFYKCTYCCTTLHINCLLGPDPYLKPDQTIPTDQIEVVLQRNNSASRQICSKCNIRCPYPTFAVYTKEMVSHIRCALTC

SEQ ID NO: 1291 - DNA, 3111 bp, Arabidopsis thaliana
  CDS (1)..(3111)
atggcttcactgcggaagaagcttcccttaaacaggttccgccgccgcttggacaagctgcgatctagacataacattcgatctgtaaggcaaaggtttggcaatggcggcaacacgcagcagcaacggccaccaactaaacacctttgccctttctccgatccagttgaaccgcacaagctccaacgccgccgtttactaagtcagtctcaactctctgaatgcttcggatgcaaaggcaaacacttggagggaaaaaggtactattacttttgtcctctttgcaatttggaattccatagaggttgtcacgtcttaccacagcagatgaaacaccctcttcacctttctcacccactcaccctcatctccttagatcctaattttgacacctctaagatacctcaagaatggggagaatcgtcgtcctctgattcagaaggttcttttgacagtgatgatgagtttggtggtcgtcgtcgtcttcttcgtcgtcgtgctcgtttttttagtcctttttttgatgttgaagatgatgatgatgatgatgttgatcttgatgatgatgacgatgatgatgatgatgacgataacgatctatcagatatatattatggaaaatgcaaatgttgtcagaaacgttttgaagatatatactatcattgttctgtttgcaacttcagcctcaatttcacttgtacgataaagccaccacctctcactatcactcacctaaaaagccacagccacattctcactctttttcctagacgaatccctttaccttgtgatgtttgtgggttgtctctcaatgacgctcatgatccagtttacgcttgtcttccttgtaactacatggttcatagagcttgtattaatctacctcgtgtcattaagatcacccgccaccaacaccgcctgtctctcatttcctctcttatttccggtgatttttcttgtggagtttgtcgtaaaaccatcgacattagctacggacattattcttgcattaagggatgttgttatggtgcacattccaaatgtgcaacgaataaaaacgtgtgggacggcaaagatctcgaagatgtgcctgaagaaccagaagaagttatcgaaccattcgtaagaattgatgaggagacgatacatcatttcactcattcatgtcatctaaaactccaagggaagggtagccatcgcggtgaaaaaaagttttgtaaggcgtgctgctttccaatatcgatttatgatactttttacacttgtttggactgcgactttgttcttcacgaagcatgtgcatgtcttcctcgcatacaacatcatccgctacacaagcatccacttatccttaacaaaagtgacccctctcttcagctttacgttgatggttattctgttgaaggcatgtttgcttgcagtgcttgtcgccgacatagtacgggtttcgtgtacagttgcaacgtagaattttgtgactttcaggtagatgtcaagtgtgctttccttcctgatacatcagtccatgagagccatccaaatcaccccatctacatcaatttgaccaaaggagcatgcatgggttgtagtaatgcgtgttcaagaaagtacttagagtgtttgatctgcgactcctttctgggagttgaatgtgctactttgccaagtgtagcacactacaagcacgatagccatccactcacactttgctatggagaaaaaggaacaacaagtggtcaatactggtgtgagatttgtgaatcaaaactagatgcgagcgagtggttctatacatgtgactcttgtagagtcactctccatctgaaatgtttattgggaaatgacatgtacattaaaccccaacattttgtcggaaaagaaggagagattgaaattgctcttaacgatggtaacactcgaccgttttgctctgtatgtcatgtacgttgtacggacatttcggtattcaagtaccaagataatgtttactgtgatttgggttgtgttagaaaagttaagatctatgagagcagaggaagtgaactcttcagcagccaaacagcacagctcaagtccctcaaactaatacgacttctcgatagagcccgtaagctaaaggacagtcaacgtgaattcaaattcccgctgattctaagtctccacacgaaggaagaaaatcttcgtcaagatgagatcatatggcaaagagaagaagttagtgtttccggaattagtttcagtgagattccgacaacaagaagatctgttaacgatgaaactgattctttggatcatgttacttctcaaatctacaacaatataaagagaactctcataactttagattcatcagattcacaaggattggtacatgttttgatgtggaatgatcagggtttaagctggaatcctcgagttttttacttgccgaatttcgcaacgaaacaacaatgtgaagccgttatcgatatggcaaagcctaagcttaagccttctacgcttgctttaaggaaagaaactaaacattttcaaatgcagtaccggagtcttcatcagcacaccgatgaagacgaatccggggttttagctgccatcgaagagaaaatagctttagccacaagattccccaaagattattacgaatcattcaacatcttgaggtatcagcttggccagaagtatgattcacattatgatgctttccattcagcagagtatggtcccctaataagccaaagggtaattgattcaaaactaccatctgttgatcctccactcatggctcaacatatgaatgcaggtcgtgactttcctattgttcttatcgagtgtcgaagaaggtggagagacgatgttcccattcgaggaaacagagatatcgataaaaatgtggaaacgaagaagaagatgaagaagcttgagcttggttcccaaataaaggtctcaataacgacacccatcgatccaaaattcaccggtaaatcagccggagaaagaagtaaaagaacaaacaaaaaaactcaattacgtcggagagaatttgagatcttgactgatatgtttgaattcaccacaacgcaactaatcgccaaagatgtatatcaaatatga

SEQ ID NO: 1292 - protein, 1036 aa, Arabidopsis thaliana
MASLRKKLPLNRFRRRLDKLRSRHNIRSVRQRFGNGGNTQQQRPPTKHLCPFSDPVEPHKLQRRRLLSQSQLSECFGCKGKHLEGKRYYYFCPLCNLEFHRGCHVLPQQMKHPLHLSHPLTLISLDPNFDTSKIPQEWGESSSSDSEGSFDSDDEFGGRRRLLRRRARFFSPFFDVEDDDDDDVDLDDDDDDDDDDDNDLSDIYYGKCKCCQKRFEDIYYHCSVCNFSLNFTCTIKPPPLTITHLKSHSHILTLFPRRIPLPCDVCGLSLNDAHDPVYACLPCNYMVHRACINLPRVIKITRHQHRLSLISSLISGDFSCGVCRKTIDISYGHYSCIKGCCYGAHSKCATNKNVWDGKDLEDVPEEPEEVIEPFVRIDEETIHHFTHSCHLKLQGKGSHRGEKKFCKACCFPISIYDTFYTCLDCDFVLHEACACLPRIQHHPLHKHPLILNKSDPSLQLYVDGYSVEGMFACSACRRHSTGFVYSCNVEFCDFQVDVKCAFLPDTSVHESHPNHPIYINLTKGACMGCSNACSRKYLECLICDSFLGVECATLPSVAHYKHDSHPLTLCYGEKGTTSGQYWCEICESKLDASEWFYTCDSCRVTLHLKCLLGNDMYIKPQHFVGKEGEIEIALNDGNTRPFCSVCHVRCTDISVFKYQDNVYCDLGCVRKVKIYESRGSELFSSQTAQLKSLKLIRLLDRARKLKDSQREFKFPLILSLHTKEENLRQDEIIWQREEVSVSGISFSEIPTTRRSVNDETDSLDHVTSQIYNNIKRTLITLDSSDSQGLVHVLMWNDQGLSWNPRVFYLPNFATKQQCEAVIDMAKPKLKPSTLALRKETKHFQMQYRSLHQHTDEDESGVLAAIEEKIALATRFPKDYYESFNILRYQLGQKYDSHYDAFHSAEYGPLISQRVIDSKLPSVDPPLMAQHMNAGRDFPIVLIECRRRWRDDVPIRGNRDIDKNVETKKKMKKLELGSQIKVSITTPIDPKFTGKSAGERSKRTNKKTQLRRREFEILTDMFEFTTTQLIAKDVYQI

SEQ ID NO: 1293 - DNA, 1785 bp, Arabidopsis thaliana
  CDS (1)..(1785)
atggataatgaccgtggaatatttcatatgatggagaaagatggtaaattatccttggtatatcgccctcccataatacaaactcgaagtccaacctcctccggtagaatagtaatacgatggaaaaatagagactttccgtataccataagattttcttcaattaccaatgtcccattcggttctatcataaattacgtcagaattaaatatgctcatgatgatcattttgtactccctttgttttggtgcaacgataaagaatttgatgtcaatggtggatgcagtgcatgcaatggctcatattttggcactgattattatttctgtaactgtaataaaatgtatcacaaagaatgtgtcgagtctccacttaaaataaaacacccttaccaccctgagcactctctcgaatgttacattcatcctccttttgctcacaatattgagtgtttatgttgtggaagaatagcatcaggtcaggtatattattgttccatatgtagagttcttatgcattcaatatgtgcgatgaagacgatacctatggttataaaccaaccaaaaaggcatgatcatcctctcattttctttcctaaacaaaattctttaacctgcaacgtttgtggtttgttaagaaaactttattccacatacatatgtgccatatgcaactttgtagcccataaagattgtatgtattctccacgcataatcaagatatcacattgttcttgtacaatatgtcgtcaaagtattgacagtgattatggtgcatatagttgtgctatgtgtggtgattatgttgttcattcaagatgtgctttaggaaaagatgtatgggatggtgaagatcttgaaaatgtacctgaagaagataataaattacaagatgtcacgtcttttgatataatatctgacggagtaatacttcattttcttcatgaccatcatctccggctcaaggttagcatactttatgatgaaaacaagttttgtcaagcgtgtgttcttcctatcgttgaaggtaatttctactcatgtatggagtgtgatttcatcttccatgaaacatgcccaaattcttgccgcatactactacatgcgttacatccgcatcaacttacattggaacatgtggagtacgattcttgtagattcatgtgcaatgcttgtgaacgtttttgtggtggttttatctatggatgtcacataagggaatgcaaattctatcttgatgtacggtgtgcttccatttatgagccatttaattacaaatatcatgaacattccatgttcctcgcttcagatccaaaagaagaactactttgtcaggtatgcaaaacaatatgtcataaacaattaaattgtatcaaatgtgattttattgtatgcatcaagtgtgctaccttgccagaaaaagtaaggtataaacatgacaaacactttctcagagttttatttggagaagaattatgtaagggagactggtgcgaggtatgtgaacgtaatttaagagctacagacacaaaagtgttctattggtgcaacgagtgtggcaccacatttcatattgaatgcttatttggtggagacctaatatatgtgaagcctggtcaaactttaaagttttttgatagggatgctgaaattcttggcaaaagtaatctttctcgaccgttatgcatgaacccggattgcaagaacccttgccaagtcaaaatattgaagacatacaacgatatagtatgttcagttaaatgtgggaatcaagttttttattga

SEQ ID NO: 1294 - protein, 594 aa, Arabidopsis thaliana
MDNDRGIFHMMEKDGKLSLVYRPPIIQTRSPTSSGRIVIRWKNRDFPYTIRFSSITNVPFGSIINYVRIKYAHDDHFVLPLFWCNDKEFDVNGGCSACNGSYFGTDYYFCNCNKMYHKECVESPLKIKHPYHPEHSLECYIHPPFAHNIECLCCGRIASGQVYYCSICRVLMHSICAMKTIPMVINQPKRHDHPLIFFPKQNSLTCNVCGLLRKLYSTYICAICNFVAHKDCMYSPRIIKISHCSCTICRQSIDSDYGAYSCAMCGDYVVHSRCALGKDVWDGEDLENVPEEDNKLQDVTSFDIISDGVILHFLHDHHLRLKVSILYDENKFCQACVLPIVEGNFYSCMECDFIFHETCPNSCRILLHALHPHQLTLEHVEYDSCRFMCNACERFCGGFIYGCHIRECKFYLDVRCASIYEPFNYKYHEHSMFLASDPKEELLCQVCKTICHKQLNCIKCDFIVCIKCATLPEKVRYKHDKHFLRVLFGEELCKGDWCEVCERNLRATDTKVFYWCNECGTTFHIECLFGGDLIYVKPGQTLKFFDRDAEILGKSNLSRPLCMNPDCKNPCQVKILKTYNDIVCSVKCGNQVFY

SEQ ID NO: 1295 - DNA, 1416 bp, Arabidopsis thaliana
  CDS (1)..(1416)
atgaagcttgttctcacaggtcaactaccagactattctgatggaaaatgtcgtctttgcgaaaaaaagatcgatagccctttgttctatcattgttctccatgtaacttcaccttggatatgcgttgtgctttaaacccgccatcaatatctttcgaggattcgaaaactcatgatcaccaactcactcttctcccaagactcgactcttttacatgtaatgcttgtgggctgaagggagatcgaagcccttacatatgtgttcaatgtaatttcatcatccaccaagagtgtcttacccttccacgccttataaacataaatcggcatgatcaccgtgttgctcgcactaatcttctgggtcttgtatattctgtgtgtggagtttgtcgccaaaaagtggattggacttggggaggttattcttgtcaaaggtgttctaactatgtcgttcattccaaatgtgctacaagaaaagatgtgtggaacgggaaagaactcgaaggagttattgaagaaacagaagatatagagccgtatgtggtaatagatgacaacacaatacaacatttcagccacgaagagcattacctaaaactcgacgacaatggtgttttatgtgatgaaaacaagcggtgcagcgcatgcacccattccgtttgcctcgaatccttctatggttgtatggattgtgacttcattcttcaccaaaactgtgctaaatttcctaaaaggaaacgacatgtgctacacaatgaacggcttactttatttacacgcgaggctggtcacttttggtgtaatgtttgtggtagaatctccaatggtttcagttaccaatatggggatatgaaattagatgtcatatgttgttcagtgttggagccatttgtccatccaagtcatcccgatcatcccttatattacatttcaccagagatggaagaagtctgcaatggttgtaacatgtcgggaactagaatgctcaggtgcattgaagatggttgtggatttgtcttatgcttcaaatgcgccactttaccgcgagtgttaaagcatagagttgacgattatcctctcttactatgctatggcgaaaaggcaaatggtatatattggtgtgagatttgtgagaaaaaaatgaatccagagaaatggttctacacatgtaaagatcaatgggctagtttgcacacagagtgtgtagtcggagacttttcagggctcatgccaggaagcgtagtaaaggctgagacgggatcatatgaggttgtgctcaacaagaatgtatctcgcccgttttgcaggcagtgtaagtcgcattgcatgtaccctatcatctataagatacctgaaacctcagtttcttatctttgctctgatatttgcataaagcgttttacaaagagagactga

SEQ ID NO: 1296 - protein, 471 aa, Arabidopsis thaliana
MKLVLTGQLPDYSDGKCRLCEKKIDSPLFYHCSPCNFTLDMRCALNPPSISFEDSKTHDHQLTLLPRLDSFTCNACGLKGDRSPYICVQCNFIIHQECLTLPRLININRHDHRVARTNLLGLVYSVCGVCRQKVDWTWGGYSCQRCSNYVVHSKCATRKDVWNGKELEGVIEETEDIEPYVVIDDNTIQHFSHEEHYLKLDDNGVLCDENKRCSACTHSVCLESFYGCMDCDFILHQNCAKFPKRKRHVLHNERLTLFTREAGHFWCNVCGRISNGFSYQYGDMKLDVICCSVLEPFVHPSHPDHPLYYISPEMEEVCNGCNMSGTRMLRCIEDGCGFVLCFKCATLPRVLKHRVDDYPLLLCYGEKANGIYWCEICEKKMNPEKWFYTCKDQWASLHTECVVGDFSGLMPGSVVKAETGSYEVVLNKNVSRPFCRQCKSHCMYPIIYKIPETSVSYLCSDICIKRFTKRD

SEQ ID NO: 1297 - DNA, 2079 bp, Arabidopsis thaliana
  CDS (1)..(2079)
atgacttatgagttagaagagttagaaggacacgagcatcttgtttcccgcgttaaacatcatgatggtctggaatgcgatgcttgtgatcgattgaatgttgatggctattcatgcagcgaatgcaagtttaatattcatgtagcatgtacatttgtgttcgataaacaagagatagtcgaccacccttctcatgatggacattctcttaagcttcttacaactggagctcctgatcacacagatccaaaatgtcatctctgcggtaataacaccaagcgccttctttttcattgctctgtttgtcaactcaatttggacatattttgcatagctgatcacctattaggcccagaatatctgaatatgccatggcacccccatcctctactatgttttgattttggatctagaaattggtgcgacttttgtaacgagaattatgaaggacaaggttacctctgctatcgttgcgggttgaggattcatgagaaatgtgtagttgaattacaagagatcactcaacacccttctcatgtcaggcaccctcttaagcttctcaccagtggagctccaaattacacaaacccaagacgtcatatatgtggagaggacactggaaacttactttatcattgtgatatttgtaagttcaatttggatttgcagtgtgcgataaaaagctctccacccgttgctctttcaaatatgaaggtccatgagcatacactcacactcatgccaaaattgatctccttcgtttgtgatgcttgtggaacaaaaggcgatcgttctccttacatatgtgtacaatgtgatctcatgaccttccatcaaaagtgtgctcgtttaccacgtgtcattcatgtcaatcaccatgaccaccgagtttccttcaagtatcctcttggtcctggagattggagatgtggagtttgttgggatgagattgattggtcatacggggcttactcatgttctctttgttctcgttatgctattcattcactatgtgcaacaagagatgacgtgtgggatggggaagagcttgatggagtacctgaagaaattgaagacatcgagccattcaagaggaatgatgacaacacaatcgatcatttctctcatcgacataaccacatgagcctcgacaaaggtggtgaagaaagtagcttctgtaaagcatgtgctcatcccatcggttcttcatcctcactctacaagtgttcagaatgcagtttcattcttcatgaaacatgtgctaatcttccgatgaagaagcgacattttctgagcccacaaccactgactcttagctatcatcgccttcaacgccgttggggagtagaaatttgcgaagcttgtcagcaaattttttgcaaaggattcatctactcgtcgtatttagaagagaactttgacttaccatgcagttcaattactgtgccttttatccatggaagtcatgatcatcatttactctacctcaaactagaaaacggtaacgtgaagacttgccagggttgcggtatcgatgaaaaaagagtcgccataggttgtaccaaatgcaattattttttggatttccgctgtgccactctaccattaacggtaacactttccaggtacgatgatcatccactcactctttgttatggtgacgaaaaagcaagcggcaaatattggtgtgatatttgcgaaagagagaccaatccaaaaacttggttctacacttgtaacgattgcggggtcactttacatgttttgtgtgtagttggagatgttagatacgccaaaccaaaagcaatgatcgagtactatatagaattgctgtcaaacaatagctcttcaagaccattttgccacaactgctattgtcgctgcccaggccccttcattcttaggataagaaagcaacatgacgcccaccttggtggagaatattacatattcttttgttcttattattgttacataatcaccaaaagtaagaaggagtactccaaaattaagttgagatgtcctccttggagaagtggacatcaaagccaattgatggagttgcaaaacgaccagtaa

SEQ ID NO: 1298 - protein, 692 aa, Arabidopsis thaliana
MTYELEELEGHEHLVSRVKHHDGLECDACDRLNVDGYSCSECKFNIHVACTFVFDKQEIVDHPSHDGHSLKLLTTGAPDHTDPKCHLCGNNTKRLLFHCSVCQLNLDIFCIADHLLGPEYLNMPWHPHPLLCFDFGSRNWCDFCNENYEGQGYLCYRCGLRIHEKCVVELQEITQHPSHVRHPLKLLTSGAPNYTNPRRHICGEDTGNLLYHCDICKFNLDLQCAIKSSPPVALSNMKVHEHTLTLMPKLISFVCDACGTKGDRSPYICVQCDLMTFHQKCARLPRVIHVNHHDHRVSFKYPLGPGDWRCGVCWDEIDWSYGAYSCSLCSRYAIHSLCATRDDVWDGEELDGVPEEIEDIEPFKRNDDNTIDHFSHRHNHMSLDKGGEESSFCKACAHPIGSSSSLYKCSECSFILHETCANLPMKKRHFLSPQPLTLSYHRLQRRWGVEICEACQQIFCKGFIYSSYLEENFDLPCSSITVPFIHGSHDHHLLYLKLENGNVKTCQGCGIDEKRVAIGCTKCNYFLDFRCATLPLTVTLSRYDDHPLTLCYGDEKASGKYWCDICERETNPKTWFYTCNDCGVTLHVLCVVGDVRYAKPKAMIEYYIELLSNNSSSRPFCHNCYCRCPGPFILRIRKQHDAHLGGEYYIFFCSYYCYIITKSKKEYSKIKLRCPPWRSGHQSQLMELQNDQ

SEQ ID NO: 1299 - DNA, 1299 bp, Arabidopsis thaliana
  CDS (1)..(1299)
atgcatcccatatgtgcgatgaagccaataccttttcttatagacccaccaaaaaagcatatccatcctctcacttttttccccagacaaacttccttgacttgtaatgtttgtggtttgttgagaaaaatttatcccacctacgtttgtttcagatgtaactttgtaactcataatgactgtatgaattccccacacatcatcaagatatcacgtcaccgtcatcgtatctcgttcactttttctcttacatctagagaatggttttgtggagtttgccgtttaagtattaacgttgattatggtgcatatacttgtgacacgtgtagcgattatgttgttcattcaatatgcgctcttgggaaagatgtgtgggatggaaaagaactcgaaggtataccagagataatcgatataacagaaaatgatggaccgttcgaggtgatatctgaaggagtgatactttattttcatcataatcatcatctccgactcgaggtcagcaacgtttatgatgaaaacatgctttgtcaagcgtgtgccattcctatctatgaaggtaacttatatgtttgtatggagtgtgatttcatcctccatgaaacatgtgctaaggctccccgtagaatccaacatgccttacatcctcacccacttgtattggaggttatcaatagctttacttacaataccttccgttgcaacgcttgtgatcgtggttctattggctttgcctatcactgtaggatggaggtatgcaactttttcaagcttgatgtaaggtgcgctttaatttctgagccgtttgattacaaaggtcatgaagatcccttgttcctagctttaaacccagaaataaaacccatatgtcatatatgcaaaacagaatgtttaaaacaattaaattgcatcaaatgcaatttcattgtatgttttaagtgtgttaccttaccatacaaaataaaatataagcatgacacacacttcctcacaatttcatttggtgaagaagtacgtgagcaagaatggtgtgaaatatgtgaacgtagtttaaaggatacatgcacaaaagtattctactggtgcaacgagtgttgcaccacttttcatattgaatgcttaattggtggagacccatatatcaagcccggtcaatatttcaataaatgggtatgcagggttcaagttcttcccaaatgtaatatttctcgaccattatgtggttcttgcaagaaccgttgtatagggaaaatatatgatgtaggctaccgtgttgaatgttcatatgaatgtatttaa

SEQ ID NO: 1300 - protein, 432 aa, Arabidopsis thaliana
MHPICAMKPIPFLIDPPKKHIHPLTFFPRQTSLTCNVCGLLRKIYPTYVCFRCNFVTHNDCMNSPHIIKISRHRHRISFTFSLTSREWFCGVCRLSINVDYGAYTCDTCSDYVVHSICALGKDVWDGKELEGIPEIIDITENDGPFEVISEGVILYFHHNHHLRLEVSNVYDENMLCQACAIPIYEGNLYVCMECDFILHETCAKAPRRIQHALHPHPLVLEVINSFTYNTFRCNACDRGSIGFAYHCRMEVCNFFKLDVRCALISEPFDYKGHEDPLFLALNPEIKPICHICKTECLKQLNCIKCNFIVCFKCVTLPYKIKYKHDTHFLTISFGEEVREQEWCEICERSLKDTCTKVFYWCNECCTTFHIECLIGGDPYIKPGQYFNKWVCRVQVLPKCNISRPLCGSCKNRCIGKIYDVGYRVECSYECI

SEQ ID NO: 1301 - DNA, 2031 bp, Arabidopsis thaliana
  CDS (1)..(2031)
atgtattcaaattcagtgggtgagtttcgtgagggagaaatcgatggaaaactatttctcatatacactttgtcatctcaaacagagagcctttcttccggtgaagcagcggttgattccgatggtggggacggcctctctcttgagcctcggatcctctgtcctactttccgtctcaaagttaaaaagttgaaaccatacacgagagattcagatcgtagctttttcccgttggttgtttcccctcacttccccaccatacaaagtggtcatgaacaacccgagtatatgcttcattccgacagctgtaagctacctttactccctctcttttggtgcaacaataaaaaacctcatcttttcgatttcatttgccgtgcatgcacaaccctagagccagccacaagctattacgtttgtgtcacatgtggtgaccagttccacaaagaatgtattggttctccacttgagttcaaacacccttcatatccgtctctttctctccaactttacagtcctccgtccgaccgcgtattctgctcatgttgtcaaaaacgtatcgatggcctgaattattatagtcctaccaacaacttcactctgcatctattttgtgcattcaaaccaataccctttgttatagatcacccaaaaaggcatccccatcctctcaccattttccccaaacaatctttcttaccttgccatgtttgtagcctcataaaaggacatattcccacctatgtttgtgttagatgtgtatttgtagttcatcaagattgtatctatttcccgtatgtcataaaaatatcccgtcaccaccaccgtatatcttatacctcctctcttccatctggaaaatggtcttgcggagtctgtcgtcaaatggttgacaacgactatggtgcctactcttgcaacaagtgtgatgactattttgttcattcaagatgcgcgctgcggagagacttatgggatgggatagaactcgagggagtacctgaagaacctgagatagttgttgagccatttatcacgatttctgatggtataatactccatttttctcatggccatcatctgaaactcaagatcagtagagtctacgacgaaaaaatggtttgtcaagcgtgcatccttccgatctacgagggtggctattattcatgtatggatgaatgtgacttcatcctccacgaaacatgtgcaaatgcaccttgcaagaaacatcatgctttgcatcctcacccacttacgctaacggtcgtcactagtgaatatgaagacaacataggacgtttttgttgtaaggcttgtcagcgtgaaagttgtggtttcgtctatgaggatctcagaggaaagattggtaattatagaagaaataaattccaactagatttacgatgtgcctcagtttctgaaccatttgaatatctaggccataagcatctcttatacctagctttgaatccagaagaagaaaagttagcaatatgtcaaatctgccacgaaagggaagatgagtcttctcattgcagaaaactaaattgcattgaatgtgattttgtgatatgcttcaggtgtgctaccttaccatataaggcaaggtatcaacatgacaagcatttcctcaaattttatgagacgaaagaggcaaatgatcattcagagtggtgtgatgcatgcgaaggaagaattgcagatttaagaacgagagggatctattcctgcaacgcagatttaagaacgaaagggttctattcatgcgacgactgctgcaccactcttcatattgattgtttgcttggggaagacatgtatatgaagcctggtcacaccataatgtataatatgacgggtttcgacgaacattatgagaagaagcttcgtattcttcgcaacaatactttgtctcggccatgttgcagtacatgcgggcagcgttgtcgacagaaaatagttttcaaatacaaagaacaccatatattttgtgctatatcttgccagaagcatgtaattaattactcatag

SEQ ID NO: 1302 - protein, 676 aa, Arabidopsis thaliana
MYSNSVGEFREGEIDGKLFLIYTLSSQTESLSSGEAAVDSDGGDGLSLEPRILCPTFRLKVKKLKPYTRDSDRSFFPLVVSPHFPTIQSGHEQPEYMLHSDSCKLPLLPLFWCNNKKPHLFDFICRACTTLEPATSYYVCVTCGDQFHKECIGSPLEFKHPSYPSLSLQLYSPPSDRVFCSCCQKRIDGLNYYSPTNNFTLHLFCAFKPIPFVIDHPKRHPHPLTIFPKQSFLPCHVCSLIKGHIPTYVCVRCVFVVHQDCIYFPYVIKISRHHHRISYTSSLPSGKWSCGVCRQMVDNDYGAYSCNKCDDYFVHSRCALRRDLWDGIELEGVPEEPEIVVEPFITISDGIILHFSHGHHLKLKISRVYDEKMVCQACILPIYEGGYYSCMDECDFILHETCANAPCKKHHALHPHPLTLTVVTSEYEDNIGRFCCKACQRESCGFVYEDLRGKIGNYRRNKFQLDLRCASVSEPFEYLGHKHLLYLALNPEEEKLAICQICHEREDESSHCRKLNCIECDFVICFRCATLPYKARYQHDKHFLKFYETKEANDHSEWCDACEGRIADLRTRGIYSCNADLRTKGFYSCDDCCTTLHIDCLLGEDMYMKPGHTIMYNMTGFDEHYEKKLRILRNNTLSRPCCSTCGQRCRQKIVFKYKEHHIFCAISCQKHVINYS

SEQ ID NO: 1303 - DNA, 2061 bp, Arabidopsis thaliana
  CDS (1)..(2061)
atggaaaaagtggtgctacgggttcatgaccatcctttgttaccctttgaacgcttttattttggccgttgttccgggtgctcacgtgaaggctacttttatggaggctaccgttgcaatgagttggcgtgttttgcggtgttccataaggagtgcgctgagtccaaacccgagatcagccaccatgcccatcccaagcatctgcttaagcttggcaatagacgtcaacgttgtcatttgtgtgaacggccggtgggaattggttatttttgttcgatatgtgactttggtatgcatttggtttgtgcgaagtccccaccactctcacttcagccacaactctctagtattgagaattacaaggtgcatgaacatcctcttaaacctttcaaaacagcatggcttgcagaaactggcaattgcaaagggtgtaactacattatcggcaatggagatagcgctcctttttatgaatgtcgtcggtgtaaactttacattcatgtgacttgccttgagctctttttcaccacagatgcacgccacaactctcatctcgaacaccctctcaaatatctcaaaaatggacccccgagctacgccgaccataaatgccttctttgcggaagagagtttgaagatcaacaaggccaaaaatatgagctttatcactgtgatgtttgtaacttcagcatatgcatttcttgtcagggaaacccaccaccactagttgttgttactccgaagacccacgagcatcaacttcacctcattccaagacttcttgattttacttgcaatgcttgtgggacacaaggtgaccgaagcccttatttttgtcttcaatgcaatttcatgattcatcgaggttgtatcgacttaccccgcatcataaacatcaaccgccatgatcatcgcatctcttacatttgtcatctcggacaagggaatttgaaatgcggagtttgccgcaaaacagtggatgggttctacggggcttattcctgctcgaaatgttctagttacgttgttcattcattatgtgcaactagaaaagatgtatgggacatggtagaactagaaggaacaccggaagaagaagaaattgcgccattcgaggtggttgatgagaacacaataaagcacatgagtcatgatcatgatttaatattcaacaatgatggtataaatctccatgaaagcaagctttgtgaagcatgcgtctcccagatcaatactgatccgttctatagttgtgagctatgcggttttattttacatcaaacatgtgctaatatgcctaggaagaaaaggcatgttttgtgcaacatacccttctctctacaaacagacgatagcaaggattcttcacgcctaagaagaaaatgtagtctttgtctccaacatttcactggatttgcgtataatctgcatattgcgtataactcgcgtaccgaagttatggatatacgatgtggttcgatatttgaaccatttgttcatgaaaggcatccacatcctttatactacaagttcttcaccttttcggcggttgcgaagtgcgacatctgtcacataacaagaaggcatttgttatgttgtgaagagtgtgactttaggttggatttcaggtgcgcaactttaccaaaaaaagtaatgaagcaaaggtacgatgaccatccacttttcttgtcttatggtgaaaataatgtggatggtgaatactggtgtgacgtatgtgaaaaaagggtagatgcaaagacatggttctatacatgtgatgcttgtggggtcactttacatgtttcttgcgttgtgggtgacttctcctatcatatgccaggaccattatcaaccgtagttagcgaatacaaaatggtaccgcccgcggtagtaagcttatacaaagtggtgccaaacacttcgatttgtagaccactttgctccaggtgtcacactagatgcaaactcccttgcattcttgaaacctccgaggatggtgttaatgtttacttttgttctaatgattgtcataaaaatccttgggagtcgtcgtattattag

SEQ ID NO: 1304 - protein, 686 aa, Arabidopsis thaliana
MEKVVLRVHDHPLLPFERFYFGRCSGCSREGYFYGGYRCNELACFAVFHKECAESKPEISHHAHPKHLLKLGNRRQRCHLCERPVGIGYFCSICDFGMHLVCAKSPPLSLQPQLSSIENYKVHEHPLKPFKTAWLAETGNCKGCNYIIGNGDSAPFYECRRCKLYIHVTCLELFFTTDARHNSHLEHPLKYLKNGPPSYADHKCLLCGREFEDQQGQKYELYHCDVCNFSICISCQGNPPPLVVVTPKTHEHQLHLIPRLLDFTCNACGTQGDRSPYFCLQCNFMIHRGCIDLPRIININRHDHRISYICHLGQGNLKCGVCRKTVDGFYGAYSCSKCSSYVVHSLCATRKDVWDMVELEGTPEEEEIAPFEVVDENTIKHMSHDHDLIFNNDGINLHESKLCEACVSQINTDPFYSCELCGFILHQTCANMPRKKRHVLCNIPFSLQTDDSKDSSRLRRKCSLCLQHFTGFAYNLHIAYNSRTEVMDIRCGSIFEPFVHERHPHPLYYKFFTFSAVAKCDICHITRRHLLCCEECDFRLDFRCATLPKKVMKQRYDDHPLFLSYGENNVDGEYWCDVCEKRVDAKTWFYTCDACGVTLHVSCVVGDFSYHMPGPLSTVVSEYKMVPPAVVSLYKVVPNTSICRPLCSRCHTRCKLPCILETSEDGVNVYFCSNDCHKNPWESSYY

SEQ ID NO: 1305 - DNA, 1884 bp, Arabidopsis thaliana
  CDS (1)..(1884)
  misc_feature (818)..(818): w is a or t
atggacttgttcggagaatttcacaaagtggaattcaatgggaaaccatttcttgtataccgcaacgttataaaaccattaccacaaacacaaacctcaaactcctttgataaacaatccattgattccgtctacgatctccctcctcaacctcttttcttatgccctagactccgaacccgtatattattgaattctcttgatgatgaggtggaagatgaggtaactaatcatatcctttccaagtacagttcttcccctctctttgatgagaccagcaacaatcatcatgtactccctctgttttggtgcaacaacaaagaagttgatccggaagcagaacaaggcgatgagtgctattcctgctctatccaaaccatcggtacagactattatttttgtgccacgtgtgataaaaggttccacaaagaatgcgtcgagtgtccacttgagattagttatcctacccacaccaaacattctctccaactcttctattctaaatatagatttgaccattgcatctactgtagaaaaagagcaacctatatgatttatttttgtgctctttgcgacagttatatgcatgtcctttgtgctcagtcaaaaatacccttttttatagaccagccaaaaagacatgaccatactctcacccttttccctagacaagcttccttaacctgcaatatttgtggtttgataaataaactccatttcacctacgtttgccctatatgcgatttcgtagcccatagtgattgtatttatatcccacaaaccataagaatatcccgtcaccaccatcgtgtctcttwtatttcttcccttccttttgaagaaaagtcttgtggagtttgccgtcaaatggttgatagtgattatggtgcatacacttgcaatgtgtgtagtggctatgtcgttcacgtaagatgtgcattacgtaaggatatatgggatggtaaagaactcgcggaagtaccagaagagttagaagacgttgagtccttcaggaagatagctaatggagtaatactccatttttctcatcgccatcatctgaaatttgacataagtggagttttcgttggaaacaaattttgtcaagcgtgtgtccttccaatcaacgaaggaaatgtttatgtttgtgtggaatgtgatttcatcctacacgaaacatgtgcatatgctccacgtaaaaaggtccatccattacatccccatccccttacactaaaggttgatcatggagacgctttattccaatgcagtgcttgtatgcgtaagagtaatggtttcggatatgattgtactagccgaacttgttactacatactagatgcagtgtgtgcctcgactgctgagccgttcaattatcaaggccatcgacatcccttattcctatcgttagacccaaaagagaagccaatgtgccacatttgcaagtcaacgaaaaataagaaggtacttaactgcattgaatgtgactttattatatgttttgaatgcgccaccttaccatacatggtaaggtacaagcatgacgaacattacctcacattttgtcatggagatgaggcaaatggatcagattggtgtgaattatgtgagggaaagttagcaattggaggaaaagaagggttctataagtgcaaagattgctgcaccacgcttcatattaattgcttacttggtcctgatccatattacaaggctggtcaaacttacgaaattggtgaaattgcaattcttttgcaacacaacaattctgcttctcggcctatttgctatttttgcaatatccgttgtccgtatccaatatttttggtagccacagtggataggattgcttatattctatgttctagtaaacacttgaagtag

SEQ ID NO: 1306 - protein, 627 aa, Arabidopsis thaliana
  misc_feature (273)..(273): The Xaa at location 273 stands for Phe, or Tyr.
MDLFGEFHKVEFNGKPFLVYRNVIKPLPQTQTSNSFDKQSIDSVYDLPPQPLFLCPRLRTRILLNSLDDEVEDEVTNHILSKYSSSPLFDETSNNHHVLPLFWCNNKEVDPEAEQGDECYSCSIQTIGTDYYFCATCDKRFHKECVECPLEISYPTHTKHSLQLFYSKYRFDHCIYCRKRATYMIYFCALCDSYMHVLCAQSKIPFFIDQPKRHDHTLTLFPRQASLTCNICGLINKLHFTYVCPICDFVAHSDCIYIPQTIRISRHHHRVSXISSLPFEEKSCGVCRQMVDSDYGAYTCNVCSGYVVHVRCALRKDIWDGKELAEVPEELEDVESFRKIANGVILHFSHRHHLKFDISGVFVGNKFCQACVLPINEGNVYVCVECDFILHETCAYAPRKKVHPLHPHPLTLKVDHGDALFQCSACMRKSNGFGYDCTSRTCYYILDAVCASTAEPFNYQGHRHPLFLSLDPKEKPMCHICKSTKNKKVLNCIECDFIICFECATLPYMVRYKHDEHYLTFCHGDEANGSDWCELCEGKLAIGGKEGFYKCKDCCTTLHINCLLGPDPYYKAGQTYEIGEIAILLQHNNSASRPICYFCNIRCPYPIFLVATVDRIAYILCSSKHLK

SEQ ID NO: 1307 - DNA, 1323 bp, Arabidopsis thaliana
  CDS (1)..(1323)
atgtatgtcttttgtgctcagatgaaaatacctttttttatagaccaaccaaaaagacatgaccataccctcaccctttttcctagacaagcttccttaacctgcaatatttgtggtttggtaaataaacttcatctcacctacatttgccctatatgcgatttcgtagcccatagtgattgtatctatatcccacaaaccataagaatatctcgtcaccaccatcgtgtgtcttttatttcttcccttccttttgaagaaaagtcttgcggagtttgtcgtcaaatgcttgacagtgattatggtgcatatatttgcaaagggtgtagtggctttgtcgctcacataagatgtgcactacgtagtgatatatgggatggaaaagaacttgaaggagtaccagaagaagtagaagaagatgacgttgaatccttcaagaggatagctgatggagtaatactccatttttctcatcgccatcatctgtattttgagataagtggagtttacaatggaaacaagttttgtcaagcttgtgcccttccagtcaatgaagggaatttgtatgtatgtgtgggatgtgatttcatcctacacgaaacatgtgcagatgctccacgtagaaaggtccatccattacatccccatccccttaaactaattttttatgaagacaattgcttccactgcaaagcttgttggcgtacgagtactgcttttggatataggtgtatcaaccacaattgcaagtacatgatagatatagtgtgtgcctcgactgctgagccgtttgattatcaaggccatcgacatcccttattcttatcgttagacccaaaagagaagccaatgtgccacatttgcaggtcaacaaaagataagaaggtacttaactgcattgaatgtgactttattgtatgtttcgaatgcgccaccttaccatacatgataaggtataagcatgatgaacattacctcacattttgtcatggagatgaggcaagtgactcagattggtgtgaattatgtgagggaaagttagcaattggaggaaaagaaggattctatgagtgcaaagattgttgtacgacacttcatattaattgcttacttggcccagatccatatcttatggttggtcaaaggctcccagttcctaacggtgagattttttttcgacacaacaattatactactcggcctttttgctcgatatgcaatattcgttgtccgtatccaacatttgtttcatacataaaggatatgtttatatcttatattctatgttctagtaagcacttgaagacgagataccatcattga

SEQ ID NO: 1308 - protein, 440 aa, Arabidopsis thaliana
MYVFCAQMKIPFFIDQPKRHDHTLTLFPRQASLTCNICGLVNKLHLTYICPICDFVAHSDCIYIPQTIRISRHHHRVSFISSLPFEEKSCGVCRQMLDSDYGAYICKGCSGFVAHIRCALRSDIWDGKELEGVPEEVEEDDVESFKRIADGVILHFSHRHHLYFEISGVYNGNKFCQACALPVNEGNLYVCVGCDFILHETCADAPRRKVHPLHPHPLKLIFYEDNCFHCKACWRTSTAFGYRCINHNCKYMIDIVCASTAEPFDYQGHRHPLFLSLDPKEKPMCHICRSTKDKKVLNCIECDFIVCFECATLPYMIRYKHDEHYLTFCHGDEASDSDWCELCEGKLAIGGKEGFYECKDCCTTLHINCLLGPDPYLMVGQRLPVPNGEIFFRHNNYTTRPFCSICNIRCPYPTFVSYIKDMFISYILCSSKHLKTRYHH

SEQ ID NO: 1309 - DNA, 1974 bp, Arabidopsis thaliana
  CDS (1)..(1974)
  misc_feature (384)..(384): r is g or a
  misc_feature (522)..(522): r is g or a
  misc_feature (760)..(760): r is g or a
atggaaatagtggaggtatcaccaattcacaaacatcctttgttacctattactcgtttttctcgtgaacattgtaaatgtaatgtgtgtgggtctgttggttacatttacggaggctactgttgcaatgaggtgggatgtgaatccatgtttcataaagagtgtgttgagtctttgtcagaaatcaagcacacttctcatcctgatcatcctctcaagctgctcataagtgacaaagcatcattctgtagtcggtgtgaaggtcggtttgaaaacggttatatatgttctatttgcgacttcaagttggattttcgttgtgctaaaggacctgccccactccttattcttgaaaaatccaatctgcacgagcatctacttgarttcttcgtgggatggcactcttggaagggacatagagagtgcaaagcgtgcggcggtgcgggtttccgcggttatcgatggtatggatgttatcaatgtgatacactcttccatggagaatgtgctgagttttttccrgaagcaaaacacacttctcacccgcaacacacactcaaacacatcacatctgaagaagcacccgattacgccgacaacaagtgtcttctttgcgaggaggagtttgatcaacaacatcccaaaattcaccattgtgatgtttgtaatttcaccatatgtagagcatgtatgaaaaacgcaccaccggttcgtattgaaagccttacaacccatgaacatcaactacatctcgttccargacgcattgatttcacttgcaatgcttgcgggacgctaggtgaccgaagtccttacttttgtcttcaatgcaatttcatgattcatcgccagtgtatcgatttaccacgggtcataaacatcaaccgccacgatcaccgcatctcttacacccgtcgccttggacatggagagtggaaatgcaaagtctgccgcaaaaaagtggatgggttctacggggcttatacttgcctcaaatgtcctagttttgttgttcattcactatgtgcaacaagaaacgatgtgtgggacatgatagagctagaagggatgcaagaagaagaggaaattgcgccatacgagatgattgatgctaacacgataaaacatttcagccatgatcataacctacaaatcaacaatgatggccatggcaggattcaacctgaaaatatagtttgtgaagcgtgtgtgttccagatcttgtcagaaccgttctacagttgcaaccaatgtagttttatactccacgaaaaatgtgcaaatcatccacggaagaaacgccacgtgtgcaacaacacgtcattcatactattcacagattcttgcaacaaagctaacgcttcgtgtggtctttgtaaacaacatttcactggtttcagatacgaatcaggcccttatgttactatagatgtacgatgcgctgcaattttggatacaattgagcacggaagccatcaacatcctttatattactacactacatttgactggaagccttgtagccgatgcagagaggagggcgccgttttatttcgttgtgatgagtgtgactacattttggatggaaactgtgctctttttccaaaaaaggtaatgagaaatagatacgatgatcatcttctcttcttgtctttcggtgacaagaatgtgagtggtgactattggtgtgaagcatgtgaaacgaaagtgaacccaaaggaatggttctatacatgcaacgattgtggaaccatattacatatatcttgtgttgtgggagatttctcatatatcatgccaggttctcatataacaacatggagagctaacgtggtatccaacacctctatttgtagaccagtttgctatatgtgtaactctcgatgcaaacttccttctgttcttaagctttctgacaccaaagttgatgtatacctttgttctttcaaatgtgcctattttattaggaaataa

SEQ ID NO: 1310 - protein, 657 aa, Arabidopsis thaliana
  misc_feature (254)..(254): The Xaa at location 254 stands for Arg, or Gly.
MEIVEVSPIHKHPLLPITRFSREHCKCNVCGSVGYIYGGYCCNEVGCESMFHKECVESLSEIKHTSHPDHPLKLLISDKASFCSRCEGRFENGYICSICDFKLDFRCAKGPAPLLILEKSNLHEHLLEFFVGWHSWKGHRECKACGGAGFRGYRWYGCYQCDTLFHGECAEFFPEAKHTSHPQHTLKHITSEEAPDYADNKCLLCEEEFDQQHPKIHHCDVCNFTICRACMKNAPPVRIESLTTHEHQLHLVPXRIDFTCNACGTLGDRSPYFCLQCNFMIHRQCIDLPRVININRHDHRISYTRRLGHGEWKCKVCRKKVDGFYGAYTCLKCPSFVVHSLCATRNDVWDMIELEGMQEEEEIAPYEMIDANTIKHFSHDHNLQINNDGHGRIQPENIVCEACVFQILSEPFYSCNQCSFILHEKCANHPRKKRHVCNNTSFILFTDSCNKANASCGLCKQHFTGFRYESGPYVTIDVRCAAILDTIEHGSHQHPLYYYTTFDWKPCSRCREEGAVLFRCDECDYILDGNCALFPKKVMRNRYDDHLLFLSFGDKNVSGDYWCEACETKVNPKEWFYTCNDCGTILHISCVVGDFSYIMPGSHITTWRANVVSNTSICRPVCYMCNSRCKLPSVLKLSDTKVDVYLCSFKCAYFIRK

SEQ ID NO: 1311 - DNA, 1743 bp, Arabidopsis thaliana
  CDS (1)..(1743)
  misc_feature (138)..(138): r is g or a
  misc_feature (147)..(147): y is t or c
  misc_feature (977)..(977): y is t or c
  misc_feature (1562)..(1562): r is g or a
atgcttcattccgacagctgtaagctacctttactccctctcttttggtgcaacaataaaaaacctcatcttttcgatttcatttgccgtgcatgcacaaccctagagccagccacaagctattacgtttgtgtcacrtgtggtgaycagttccacaaagaatgtattggttctccacttgagttcaaacacccttcatatccgtctctttctctccaactttacagtcctccgtccgaccgcgtattctgctcatgttgtcaaaaacgtatcgatggcctgaattattatagtcctaccaacaacttcactctgcatctattttgtgcattcaaaccaataccctttgttatagatcacccaaaaaggcatccccatcctctcaccattttccccaaacaatctttcttaccttgccatgtttgtagcctcataaaaggacatattcccacctatgtttgtgttagatgtgtatttgtagttcatcaagattgtatctatttcccgtatgtcataaaaatatcccgtcaccaccaccgtatatcttatacctcctctcttccatctggaaaatggtcttgcggagtctgtcgtcaaatggttgacaacgactatggtgcctactcttgcaacaagtgtgatgactattttgttcattcaagatgcgcgctgcggagagacttatgggatgggatagaactcgagggagtacctgaagaacctgagatagttgttgagccatttatcacgatttctgatggtataatacttcatttttctcatggccatcatctgaaactcaagatcagtagagtctacgacgaaaaaatggtttgtcaagcgtgcatccttccgatctacgagggtggctattattcatgtatggatgaatgtgacttcatcctccacgaaacatgtgcaaatgcaccttgcaagaaacatcatgctttgcatcctcacccacttacgctaacggycgtcactagtgaatatgaagacaacataggacgtttttgttgtaaggcttgtcagcgtgaaagttgtggtttcgtctatgaggatctcagaggaaagattggtaattatagaagaaataaattccaactagatttacgatgtgcctcagtttctgaaccatttgaatatctaggccataagcatctcttatacctagctttgaatccagaagaagaaaagttagcaatatgtcaaatctgccacgaaagggaagatgagtcttctcattgcagaaaactaaattgcattgaatgtgattttgtgatatgcttcaggtgtgctaccttaccatataaggcagggtatcaacatgacaagcatttcctcaaattttatgagacgaaagaggcaaatgatcattcagagtggtgtgatgcatgcgaaggaagaattgcagatttaagaacgagagggatctattcctgcaacgcagatttaagaacgaaagggttctattcatgcgacgactgctgcaccactcttcatattgattgtttgcttggggaagacatgtatatgaagcctggtcacaccataatgtatartatgacgggtttcgacgaacattatgagaagaagcttcgtattcttcgcaacaatactttgtctcggccatgttgcagtacatgcgggcagcgttgtcgacagaaaatagttttcaaatacaaagaacaccatatattttgtgctatatcttgccagaagcatgtaattaattactcatag

SEQ ID NO: 1312 - protein, 580 aa, Arabidopsis thaliana
  misc_feature (326)..(326): The Xaa at location 326 stands for Ala, or Val.
  misc_feature (521)..(521): The Xaa at location 521 stands for Asn, or Ser.
MLHSDSCKLPLLPLFWCNNKKPHLFDFICRACTTLEPATSYYVCVTCGDQFHKECIGSPLEFKHPSYPSLSLQLYSPPSDRVFCSCCQKRIDGLNYYSPTNNFTLHLFCAFKPIPFVIDHPKRHPHPLTIFPKQSFLPCHVCSLIKGHIPTYVCVRCVFVVHQDCIYFPYVIKISRHHHRISYTSSLPSGKWSCGVCRQMVDNDYGAYSCNKCDDYFVHSRCALRRDLWDGIELEGVPEEPEIVVEPFITISDGIILHFSHGHHLKLKISRVYDEKMVCQACILPIYEGGYYSCMDECDFILHETCANAPCKKHHALHPHPLTLTXVTSEYEDNIGRFCCKACQRESCGFVYEDLRGKIGNYRRNKFQLDLRCASVSEPFEYLGHKHLLYLALNPEEEKLAICQICHEREDESSHCRKLNCIECDFVICFRCATLPYKAGYQHDKHFLKFYETKEANDHSEWCDACEGRIADLRTRGIYSCNADLRTKGFYSCDDCCTTLHIDCLLGEDMYMKPGHTIMYXMTGFDEHYEKKLRILRNNTLSRPCCSTCGQRCRQKIVFKYKEHHIFCAISCQKHVINYS

SEQ ID NO: 1313 - DNA, 1488 bp, Arabidopsis thaliana
  CDS (1)..(1488)
  misc_feature (161)..(161): r is g or a
  misc_feature (1467)..(1467): m is a or c
atgcgtagagatcttcgagctcttccgtgcagtcactttcccaagatcttcatcaatggaaatcacgattgtcatttttgtaaaattgatctttcgacgacgtctttgtatgctcgttgcacgatatgcaatgtaaacatggatctagactgtatggtgartctaccaccactcactattttcgagccaaagcaccataagcatagcttcaacctcttgttacgagtagtcacctttacttgtaatgcatgtggattggaaggtgaccgtaatccttatgtatgttatgaatgccatctcatggtacacaaagattgtattgaaggtctaccgggagtcatatacatcaatcggcatgatcatcgtgtctctcacacttttcatcttggtcaagaagagagagattgggagtgtggagtttgtcgtaggacgattgattgggtctacggagcatatacatgttctctttgtcctagttatgctgttcattcaaaatgtgcaacgaggaaagaagtgtgggatggtagagaactcgaagatgtgtccgaagaagatgaagaaattgaagatccattcaaagtaattaatgaaacggatatcatacattttagtcatgaagaacatgtacttagattggatgagaattgtcatatggaaaatgacgctacgcgttgccgggggtgcattcttgctattaatggcaatctatcctacaaatgtctggaatgcgatttcatcattcacaaagtatgtgcaagtcttccgcggaagagacgacattttttgcacaaccataaactcactctacgagttgacaaggcttctatatttttatgttctacttgtgataccactcctaatggtttcagatacgagtgtgacgaagaccatggcgatgaagaatttgtctttgatcttcagtgtagttccatatcagaaccctttctacacgatttgcatccacacccgttatactggaccttggaacattccaaaaagtgtaaggcttgtggcaccaaagcaggttatgatctcaactgtatagtgtgtgatgattactcattatgcatgacgtgcgctactttaccaagtaaagtaaaacataggtgtgacgatcatcttctgtcactacgtcaaggtgcttctgacttcgatactggtcacttgtggtgtgatatttgtgagaccaagacagatccgagtgtattttactatacttgtgatgattgtggggtcagccttcatttaaagtgtgtacttggagatttatataatgcgaagctaggactaatagatcccagagatcccgctcatgaagtacttcccaataatggtgttactcgacctttctgcttccattgtgaacttcgttgtaagttccccttccttataaggagagctacagaagaatttactctttactattgttcgctaaattgttgtttagaagcagccttctatattccmcctgtaacagatgaagggtag

SEQ ID NO: 1314 - protein, 495 aa, Arabidopsis thaliana
  misc_feature (54)..(54): The Xaa at location 54 stands for Asn, or Ser.
MRRDLRALPCSHFPKIFINGNHDCHFCKIDLSTTSLYARCTICNVNMDLDCMVXLPPLTIFEPKHHKHSFNLLLRVVTFTCNACGLEGDRNPYVCYECHLMVHKDCIEGLPGVIYINRHDHRVSHTFHLGQEERDWECGVCRRTIDWVYGAYTCSLCPSYAVHSKCATRKEVWDGRELEDVSEEDEEIEDPFKVINETDIIHFSHEEHVLRLDENCHMENDATRCRGCILAINGNLSYKCLECDFIIHKVCASLPRKRRHFLHNHKLTLRVDKASIFLCSTCDTTPNGFRYECDEDHGDEEFVFDLQCSSISEPFLHDLHPHPLYWTLEHSKKCKACGTKAGYDLNCIVCDDYSLCMTCATLPSKVKHRCDDHLLSLRQGASDFDTGHLWCDICETKTDPSVFYYTCDDCGVSLHLKCVLGDLYNAKLGLIDPRDPAHEVLPNNGVTRPFCFHCELRCKFPFLIRRATEEFTLYYCSLNCCLEAAFYIPPVTDEG

SEQ ID NO: 1315 - DNA, 2115 bp, Arabidopsis thaliana
  CDS (1)..(2115)
  misc_feature (529)..(529): y is t or c
atgtctcccgcaaaacaaataagatttgatcttgattgggttggtgaaaagaggatgaattctttcattactaaagtaatgtctctcgtcagctcaatggatttggatttgcagccgaagccggagtcggagttcatgtcactcactactcaaatattctctctactccactctatggattcggattccatgccgaagccgctctcaaatctcatctcactcctttctcaaggaaactttgaccataataccgacttcaggttattctttcgtcaaactatggcactcgagccagagccaatatttatgtcactcatctatcaaatattctccctagtaatatctatgaatactaagagggataagcttatttccttatgtcctcaagcatgcgtggttttgggtaataatgggaattttgaagtgatcgttaaaaaacaagaaggtcaagctcataagggcaaagcaatcccgtggagtagagatagcaagtgggaatgtcttccttttaactggaagacatattggyctagtggagatgatgttacacattttcgatgccgaaactgcgatggcgacaaccataaagaatatgaaaaggctccggttgagatcaaacactctcttcatcggaaacattctcttcagcttgtcttgttggatgagagtagttatacgagggtatgctattgttgcgatgaagatctcaaaaggatgttttattattgtcggacttgcgattttggtcttaatttcgtttgtgcgaagaaagaagcaatcttatatatagaccaaccgaagtggcatgagcatacacttgcgttgtttctaagaaagacttcgttaacttgcaacgcatgtggcttatcacattcaagttgtcctctctatatgtgtcccccttgtgactttgtgatccataagagttgtatcagcttaccacgtctcataaggatatcacgacatttccatcgtatagcttataccccttcttttgatgaaggagattggtcttgtagtgtttgtcgcaagaagatcgacaatgattacggaggctatgtttgtaccaaaggttgttcgtatgcggctcattcaaaatgtgccactcagagcaatgtgtgggatggtatagaacttgagggagagccagaagatattgaagaagaagtgcttcctccgtttttggagataagtgatggaatcatacaacattttagtcatcagcaacatcatatgaaacttgacgagaacacgggcagagattacgacgagaataaggagtgtgaagcatgcatcaggccaatctatttcggtaatttctactcttgtttggaatgtgattttattcttcacgaagagtgtgcaaacctttctcgcaagatacatcacccgatacatccacatcttctcaatctaattggaggatttgatggtgttataaactattataacgataaatgctcagcttgtattggactgtgcaaaggtggtttcttctatgagtgtggtaaacaaggatgtaagtttatgctacatgtgcagtgcgccacaacttctgagccattagttcatgaaagtcataggcatccactatttctaacatccaaaccaggagagaaaatacgttgttcagtttgcaaggattcagaagagacattcaattgcattgagtgcgactttgctttgtgtttctattgtgctattttccctcaaaaggtgaggtataagcatgataagcacacactcactctttcttacgggaaggagacaggtacgtcttggtgtgaagtttgtgaggctaaaataaatctgaaaggacggttttatatgtgtaatgagtattgttgtgtccccctacacattaaatgtacgctaggggacttacacatgaggcccggttcaacgtggatcacctttggtaacaaggtagatgttctacacaacagtaaccgtatgtctcgatctatttgctcctattgtgtgaaacactgtccatataagatagtttacatgtgttctggattgatattatgttcccaaggttgtgtagtgcgtagcatattgcagaaacgtggacgttacagagagttagaatttttgagtagatatgcttaa

SEQ ID NO: 1316 - protein, 704 aa, Arabidopsis thaliana
  misc_feature (177)..(177): The Xaa at location 177 stands for Pro, or Ser.
MSPAKQIRFDLDWVGEKRMNSFITKVMSLVSSMDLDLQPKPESEFMSLTTQIFSLLHSMDSDSMPKPLSNLISLLSQGNFDHNTDFRLFFRQTMALEPEPIFMSLIYQIFSLVISMNTKRDKLISLCPQACVVLGNNGNFEVIVKKQEGQAHKGKAIPWSRDSKWECLPFNWKTYWXSGDDVTHFRCRNCDGDNHKEYEKAPVEIKHSLHRKHSLQLVLLDESSYTRVCYCCDEDLKRMFYYCRTCDFGLNFVCAKKEAILYIDQPKWHEHTLALFLRKTSLTCNACGLSHSSCPLYMCPPCDFVIHKSCISLPRLIRISRHFHRIAYTPSFDEGDWSCSVCRKKIDNDYGGYVCTKGCSYAAHSKCATQSNVWDGIELEGEPEDIEEEVLPPFLEISDGIIQHFSHQQHHMKLDENTGRDYDENKECEACIRPIYFGNFYSCLECDFILHEECANLSRKIHHPIHPHLLNLIGGFDGVINYYNDKCSACIGLCKGGFFYECGKQGCKFMLHVQCATTSEPLVHESHRHPLFLTSKPGEKIRCSVCKDSEETFNCIECDFALCFYCAIFPQKVRYKHDKHTLTLSYGKETGTSWCEVCEAKINLKGRFYMCNEYCCVPLHIKCTLGDLHMRPGSTWITFGNKVDVLHNSNRMSRSICSYCVKHCPYKIVYMCSGLILCSQGCVVRSILQKRGRYRELEFLSRYA

SEQ ID NO: 1317 - DNA, 1299 bp, Arabidopsis thaliana
  CDS (1)..(1299)
  misc_feature (255)..(255): y is t or c
  misc_feature (951)..(951): m is a or c
atgcatcccatatgtgcgatgaagccaataccttttcttatagacccaccaaaaaagcatatccatcctctcacttttttccccagacaaacttccttgacttgtaatgtttgtggtttgttgagaaaaatttatcccacctacgtttgtttcagatgtaactttgtaactcataatgactgtatgaattccccacacatcatcaagatatcacgtcaccgtcatcgtatctcgttcactttttctcttacatcyagagaatggttttgtggagtttgccgtttaagtattaacgttgattatggtgcatatacttgtgacacgtgtagcgattatgttgttcattcaatatgcgctcttgggaaagatgtgtgggatggaaaagaactcgaaggtataccagagataatcgatataacagaaaatgatggaccgttcgaggtgatatctgaaggagtgatactttattttcatcataatcatcatctccgactcgaggtcagcaacgtttatgatgaaaacatgctttgtcaagcgtgtgccattcctatctatgaaggtaacttatatgtttgtatggagtgtgatttcatcctccatgaaacatgtgctaaggctccccgtagaatccaacatgccttacatcctcacccacttgtattggaggttatcaatagctttacttacaataccttccgttgcaacgcttgtgatcgtggttctattggctttgcctatcactgtaggatggaggtatgcaactttttcaagcttgatgtaaggtgcgctttaatttctgagccgtttgattacaaaggtcatgaagatcccttgttcctagctttaaacccagaaataaaacccatatgtcatatatgcaaaacagaatgtttaaaacaattaaattgcatcaaatgcaatttcattgtatgttttaagtgtgttaccttmccatacaaaataaaatataagcatgacacacacttcctcacaatttcatttggtgaagaagtacgtgagcaagaatggtgtgaaatatgtgaacgtagtttaaaggatacatgcacaaaagtattctactggtgcaacgagtgttgcaccacttttcatattgaatgcttaattggtggagacccatatatcaagcccggtcaatatttcaataaatgggtatgcagggttcaagttcttcccaaatgtaatatttctcgaccattatgtggttcttgcaagaaccgttgtatagggaaaatatatgatgtaggctaccgtgttgaatgttcatatgaatgtatttaa

SEQ ID NO: 1318 - protein, 432 aa, Arabidopsis thaliana
  misc_feature (317)..(317): The Xaa at location 317 stands for Leu, or Phe.
MHPICAMKPIPFLIDPPKKHIHPLTFFPRQTSLTCNVCGLLRKIYPTYVCFRCNFVTHNDCMNSPHIIKISRHRHRISFTFSLTSREWFCGVCRLSINVDYGAYTCDTCSDYVVHSICALGKDVWDGKELEGIPEIIDITENDGPFEVISEGVILYFHHNHHLRLEVSNVYDENMLCQACAIPIYEGNLYVCMECDFILHETCAKAPRRIQHALHPHPLVLEVINSFTYNTFRCNACDRGSIGFAYHCRMEVCNFFKLDVRCALISEPFDYKGHEDPLFLALNPEIKPICHICKTECLKQLNCIKCNFIVCFKCVTXPYKIKYKHDTHFLTISFGEEVREQEWCEICERSLKDTCTKVFYWCNECCTTFHIECLIGGDPYIKPGQYFNKWVCRVQVLPKCNISRPLCGSCKNRCIGKIYDVGYRVECSYECI

SEQ ID NO: 1319 - DNA, 1995 bp, Arabidopsis thaliana
  CDS (1)..(1995)
atggatctaccacccaaaatactaccaactcacaaatatcctttgaccatttcgactcgttttgttaatgattcttgtaaaggttgcaatataaaaggtcccatctatggcggctaccgttgcaacgagccttcctctactagtttgttcttccacaaagagtgcgcagaggctccaccggagattatcaaccatccttctcatcctcaacacactcttaaactccacaattctctaaggaacccatgtaaatgtaatctatgtggcaagacttttttcgcttttggttatcgttgttcatcaaaatgtgacttcatcgtggatctcacttgtgggataaatccattgccggtttctatcgaacatccaaagtctcatcatcatccagttatcttcttgaaagaacccgcaaagccgggtaggcgcagatgcggaatttgcaagggctataatggtggatgttcttatgcatgtcttgaatgtgaagtccactttcatgtcgagtgtgtcaatctttcccaagaggtgaatcatccttctcatcctcaacattctctcaagttacttgaatatgaatcactaacaagtgatgctgaagagacatgtcttttatgtggagaacgaccagacaaagtgctttatcgctgctcgatatgcaacttcagcgtatgtcgattctgtacaaaagatccaccaccacttgctatcgagcatcataagacgcacgagcatcgacttgtcctcttatcaagactcatctcatttgaatgtaatgcttgtgggatgcaaggtgatcgaagtccttacatgtgtgttcaatgcgggtttgttgtccatagaacttgtattgacttaccacgtgtcataaacatcaaccgtcacgatcatcgcatctctttcacccatcatctcggtgttgggtactcgagatgcggtatttgtcgcaaagatataagtcaataccatggggcttatttatgccctcgttgcccgaactatgcagctcattcactatgtgcaacaagaaaagacgtatgggatggggtagaactcgaagggacaccagatgatgatgacgaagatattgtgccgttcaaagtggtgggtgataacttgatcaagcatttcagtcatgaagaacataatctaagactcaacaaggacaatatcaatcgtgacgaaggctcacgttgtgaagcatgcgtccttcctatctattccgatccgatctacaactgtgaggaatgtcgtttcattctccatgagaaatgcgctaatcatccaaaaaagaaacgacatgtattccacacaaaaccattcacactatggtccagaccacctcgtacattccatagcaaagattttagattctacgatgtctttcgctgctatgcttgtagaacgaagtctactggtttcaggtacgtttctgattggtgggttctagatgtacgttgtggttcgcgttctgaaccggtcattcatgatggtcacagacatcctctatattacgaacataagaaagatcactgttgtgatgcatgttataaagagatagatggttatctgctttcctgtgacacttgtgactttgatctggatttacactgtactgatttaccaaaaacggtaaagcacagctgcgacaatcatcctctttccctatgctatggcgaaaatgcaaccggaaaatattggtgtgatatttgcgaggcggaaacagatccaagtaagtggttctacacttgctctaaatgtgtggttactgcacatattgaatgtgtgcttggagacttttcacgtctcatgccaggacgcatcatcaactacaataatgttagagttgaagtggttcttaacagctatagttctcgccccttctgtgcaaaatgtcactccagatgcagagctcctatcattctaaagccttgtgatccatatactggatacatttgttccgatgcatgtgtagtgcccgactatcaatacagctaa

SEQ ID NO: 1320 - protein, 664 aa, Arabidopsis thaliana
MDLPPKILPTHKYPLTISTRFVNDSCKGCNIKGPIYGGYRCNEPSSTSLFFHKECAEAPPEIINHPSHPQHTLKLHNSLRNPCKCNLCGKTFFAFGYRCSSKCDFIVDLTCGINPLPVSIEHPKSHHHPVIFLKEPAKPGRRRCGICKGYNGGCSYACLECEVHFHVECVNLSQEVNHPSHPQHSLKLLEYESLTSDAEETCLLCGERPDKVLYRCSICNFSVCRFCTKDPPPLAIEHHKTHEHRLVLLSRLISFECNACGMQGDRSPYMCVQCGFVVHRTCIDLPRVININRHDHRISFTHHLGVGYSRCGICRKDISQYHGAYLCPRCPNYAAHSLCATRKDVWDGVELEGTPDDDDEDIVPFKVVGDNLIKHFSHEEHNLRLNKDNINRDEGSRCEACVLPIYSDPIYNCEECRFILHEKCANHPKKKRHVFHTKPFTLWSRPPRTFHSKDFRFYDVFRCYACRTKSTGFRYVSDWWVLDVRCGSRSEPVIHDGHRHPLYYEHKKDHCCDACYKEIDGYLLSCDTCDFDLDLHCTDLPKTVKHSCDNHPLSLCYGENATGKYWCDICEAETDPSKWFYTCSKCVVTAHIECVLGDFSRLMPGRIINYNNVRVEVVLNSYSSRPFCAKCHSRCRAPIILKPCDPYTGYICSDACVVPDYQYS

SEQ ID NO: 1321 - DNA, 1842 bp, Arabidopsis thaliana
  CDS (1)..(1842)
atggacttgttcggagaatttcataagggagaaatcgatgggaaaccatatcttctgtaccacaacgtaatgaaaccatcaacacaaacacacacctcaaactcctccgctgaaaaaaccaccatccaaaaaccattatcactccaaaacaaaacaaactcctccgatgaagtaaccatcggtgacggagacaacctccctatttcacctattttcatctgccttaatttacgattgcaaaaatcagcgaggattcagaatattgcattaggggatgaagacgggaaagccttacgtgataaatttttcaagctcgagacttcccctctccaaggccatggtgacaatatatcggatgatcatgtcgtactccctcttttttggtgcaacaacaaagaagctgatccaaagatggattgcaatatttgcagagtgcaaaaggcaggcacaaactattattactgtgtcgagtgtgatgtaacgtaccataaagaatgtatcgagtctccacttgagatcagttatcctacccacgccaaacatactctccaactttgcttttcatctctgcgaggagttcatcagtgcatcatctgcaaaaacagagcagatcttatcatttattattgtgctctgtgtgacatttatatgcatgcggtttgtgctcaggcggcaatacccttttttatagaccaaccaaaaaggcatgatcataccctctctcttttccctagacaagcttccttaacctgcaatgtttgtgctttggtcaataaactccatctcacctacgtttgtcgttctatatgcgatttcgtagcccatagtgattgcatccatgtcccacaaaccataagaatatctcgtcaccaccatcgtgtctcttttacttcttctcttccattagaaaaatggtcttgtggagtttgtcgtcgtgaggttgaccatgattatggtgcatacacttgttgtgtgtgtagtggctacgctgttcacacaagatgtgcattgcgcacagatatatgggatggcattgaactcgagggagtgcaagaagatgaagatgttgagcctccgttcaaagggatagctggtggaacaatacttcacttttctcatggttgtcaactggaatttaagacaagtgaagtttacgaccaagaaaagttttgtcaagcatgtgcccttccaatctacgagaagaatttttatgaatgtgtagaatgtgacttcatcctacatgaaagatgtgtagaggctccccgtaagaaggtccatccattacatccccatccacttatacaaaagtttactcacgtagaaggcggcttctcatgtcaggcgtgtaatcgcatgagtaatagttttggatatgagtgtctcatggaagattgtggctacaatctagatgtaaccccaaagaagagccaatctgccacatttgcaggtcaacataaattcaaaaggtataagcatgatgaacattacctcacattttgtcgtggagatgaggcaagtggcgcagactggtgtgagttatgcgaaggcaaattagcaattggaggaaaggaaggcttctataaatgcaacgagtgttgtaccacacttcatattaattgcttacttggcccggaaccatatatgaagtctggtgaaactcccccaaaggagggaggtcagtctcactgtaacaactcgtcccgtgggacccagctagcgctacagcacatcaaccctaacctctttcatacttgtaactccatattaaaaccaagaacattgaactcacaatacgaaatttgtttgattctaccgagagaaataactaacgacaagctttag

SEQ ID NO: 1322 - protein, 613 aa, Arabidopsis thaliana
MDLFGEFHKGEIDGKPYLLYHNVMKPSTQTHTSNSSAEKTTIQKPLSLQNKTNSSDEVTIGDGDNLPISPIFICLNLRLQKSARIQNIALGDEDGKALRDKFFKLETSPLQGHGDNISDDHVVLPLFWCNNKEADPKMDCNICRVQKAGTNYYYCVECDVTYHKECIESPLEISYPTHAKHTLQLCFSSLRGVHQCIICKNRADLIIYYCALCDIYMHAVCAQAAIPFFIDQPKRHDHTLSLFPRQASLTCNVCALVNKLHLTYVCRSICDFVAHSDCIHVPQTIRISRHHHRVSFTSSLPLEKWSCGVCRREVDHDYGAYTCCVCSGYAVHTRCALRTDIWDGIELEGVQEDEDVEPPFKGIAGGTILHFSHGCQLEFKTSEVYDQEKFCQACALPIYEKNFYECVECDFILHERCVEAPRKKVHPLHPHPLIQKFTHVEGGFSCQACNRMSNSFGYECLMEDCGYNLDVTPKKSQSATFAGQHKFKRYKHDEHYLTFCRGDEASGADWCELCEGKLAIGGKEGFYKCNECCTTLHINCLLGPEPYMKSGETPPKEGGQSHCNNSSRGTQLALQHINPNLFHTCNSILKPRTLNSQYEICLILPREITNDKL

SEQ ID NO: 1323 - DNA, 1803 bp, Arabidopsis thaliana
  CDS (1)..(1803)
atggaattccatagaggctgtcacatctttctgccggagataagacatccttttcatccttctcaccccctcaccttcatctccttattacttcctaaatttgatgttactaagatacccaaaaattggatggacagctcctcttcatcagacgaatctgaagacgatgatgacgacgaaaaatcgataaaggaagaatgtgaagacgatggtgatgatgatgatggcgacagttctgattctgatgatgacgacaacaattttgatgctaataatgatggtgcctctttatccgatggaaatcacttgaaatgcaaatgttgtcaggttcctttagaaaagatatattatcattgttctatctgcaagttcaatcttaacgtggaatgctcgatgagaccaccacctaccactatctcacacttgaaaagtcatgagcacatcctcacccttttccctatacgactccctctaccatgtggggcgtgcggcttgtctctaagtgacgccgaagatcttgtttacgcttgtctcccttgcaaccttttggtccacagatcttgtatctatctacctcgtgtcattaagatcacccgacacccccatcgtctctctctcactccctcccttcaacctggtgatttctcttgtggagtttgtcgccaaacagttgacgtcaactacgggcaatactcttgtgataaggaatgtcattatgctgtccattcaaaatgtgcaacaaggaatgacgtgtgggatggaaaagatcttgatggagtgcctgaagaacccgatgagtttatcgaaccgccattcctgaagattgatgaggagactattcaacatttcagtcatcaccatcatctaaagctccatgaaaagaaaaccattggcgggaaagacaagttttgtgaggcatgcacccttccagtaatgatctctcagagatattatggttgtatgcagtgtgattttgttcttgatgaaacatgtgcttctcttcctcgcaagaaaaaccacccactacataaacacccgcttaaccttcacattttgcctcttggtgagtctgccatgatcaataaaggtgctactagcaaagacatattccaatgtattggttgcggccgaattggctgtggtttcttctacaaatgcgatgaaaaagattgtgatgagtttctcctagacgtcagatgtgcttcccttccagatccttttgttcatgactgtcatccccatgatcatcctctcttctttaacttgaccaaaggtaattgcatggggtgtggttctgataactgttcatcctatttcttggaatgtattaaatgtaagtcctttttgggaatcaagtgtgctactctgccttgtgaggcccactacatacacgataggcatccaatcactctttgttacggggaagaagatactacaagtggccaatattggtgtgagatatgcgaattaaaattagatccaaagacatggttttattcttgcgacttctgtaagatcactctccatgtcaactgtttactgggggaagatatctatctgaagccctgccacattttcaaagttggtctttattataaggaagttgaaattgctcggaatgatggtaattctcggctgttttgctatacatgtgaacttcgttgtggacagactttggtattcaagtatataggtggatgcaaaagcttttgtactcttcgatgtattggaaactattttgatgcgaaagatgggtgggtttatgatgcagcgagaaatttgaatattttccggaggatctag

SEQ ID NO: 1324 - protein, 600 aa, Arabidopsis thaliana
MEFHRGCHIFLPEIRHPFHPSHPLTFISLLLPKFDVTKIPKNWMDSSSSSDESEDDDDDEKSIKEECEDDGDDDDGDSSDSDDDDNNFDANNDGASLSDGNHLKCKCCQVPLEKIYYHCSICKFNLNVECSMRPPPTTISHLKSHEHILTLFPIRLPLPCGACGLSLSDAEDLVYACLPCNLLVHRSCIYLPRVIKITRHPHRLSLTPSLQPGDFSCGVCRQTVDVNYGQYSCDKECHYAVHSKCATRNDVWDGKDLDGVPEEPDEFIEPPFLKIDEETIQHFSHHHHLKLHEKKTIGGKDKFCEACTLPVMISQRYYGCMQCDFVLDETCASLPRKKNHPLHKHPLNLHILPLGESAMINKGATSKDIFQCIGCGRIGCGFFYKCDEKDCDEFLLDVRCASLPDPFVHDCHPHDHPLFFNLTKGNCMGCGSDNCSSYFLECIKCKSFLGIKCATLPCEAHYIHDRHPITLCYGEEDTTSGQYWCEICELKLDPKTWFYSCDFCKITLHVNCLLGEDIYLKPCHIFKVGLYYKEVEIARNDGNSRLFCYTCELRCGQTLVFKYIGGCKSFCTLRCIGNYFDAKDGWVYDAARNLNIFRRI

SEQ ID NO: 1325 - DNA, 1887 bp, Arabidopsis thaliana
  CDS (1)..(1887)
atggattcggagtcggagctcatatcgatcatttctcaaatcttagctctcactagatctcacgttgaggaggaggaggaggctgaggcagagtcaaagttcttattattcattactcgaataatttctatagttagctctcttaacttgaatgtgcagccagagcccggggtcatatcgctcatttctcaaatgatctcgctaagcagctctatatcagactccaagccggagttggagctcatatcacttgtgaatcatatgatctctctcgtcaactctatagattcggaaccggagccggatccagacctcatgtcactcattactcaaatattctctcatctcgactttatggattcagatttggagctcaagtcactctttactcaaatagtctctctcgttagttctatggagtctgattcagagccggagccggaacgggagacgaagcagccaatatgcttggcccctcaatttaaactagaattatcaaacgggaaaaatcttgtgacgggatttgtcaagcgtgatggtagaaaatatgaccccgagtactgtaaccccgagtactggagggtactaaggttaacaacaggcgaaatttctcattttctctgcccaagttgcgaaggtgataatcatgaagaatatgagaaggctccacttgaggtcaaacaccctcttcatccaaaacattctcttcagcttatcttggaaaactcgtggggatgtcgaaaaaagaaatgctattgttgtgatgaaatactcctatggatattttattactgttgggtttgcgattgtggtatgaacatagcttgtgtggagaaactaccgctcttatcaatacaccatccgaagtggcatgaacatacactttctctgtttccaatactcatatccttaacttgcaacgtatgtgccttggaccatttcaactgtcctttctatatatgttccccatgtgactttgtggttcatcaaagttgtatcaccttaccacgtgttataaggatatctcgccatctccaccgtatttcctttaccccttcatttgaacaaggagattggtcttgtggtgtatgtcgcaaaaaaatcgacaatgattgtgggggttattcttgcggaaacagcggttgtacgtatgtggctcattccaaatgtgccacacagagtaatgtttgggatggtgaagatcttgagggaaaaccagaagctattgatgaaataggagttaatccatttgtgaggataagtcttggaatcatacaacatttcagccatcaacaacattatctgagacttgatgataacacgggcagagactacgacgagagtaagctgtgtcaagcatgcatcacgccaatctattttggtaaattctactcttgtatggaatgcaatttcattctccacgaagaatgtgcaaatttttctcgcaaaatacaacacccgatacatccacatctgctcactttagtgacttccgcgaccgataaagccaacactcatgatttatgttcagcttgcccatggttgttcaccaccggtttcttctatgagtgccacagagaaggatgtcgttttaatctacatgtgcggtgcgggacaatttctgaaccattagttcatggaagtcataggcatcctttattcctaacatctaaaccaggagattggagaacatgtagtgtttgcaaagagtcaagccgttatgtcacacatgaaacatttaattgcgttcaatgtgtctttgctttgtgtttcaagtgtgctgctatacctcagaaggtgaggtataagcatgataatcatgtgctcattctttcttatgggaaggagatcgagacaagtaccatggcgtattggtgtgaagcttag

SEQ ID NO: 1326 - protein, 628 aa, Arabidopsis thaliana
MDSESELISIISQILALTRSHVEEEEEAEAESKFLLFITRIISIVSSLNLNVQPEPGVISLISQMISLSSSISDSKPELELISLVNHMISLVNSIDSEPEPDPDLMSLITQIFSHLDFMDSDLELKSLFTQIVSLVSSMESDSEPEPERETKQPICLAPQFKLELSNGKNLVTGFVKRDGRKYDPEYCNPEYWRVLRLTTGEISHFLCPSCEGDNHEEYEKAPLEVKHPLHPKHSLQLILENSWGCRKKKCYCCDEILLWIFYYCWVCDCGMNIACVEKLPLLSIHHPKWHEHTLSLFPILISLTCNVCALDHFNCPFYICSPCDFVVHQSCITLPRVIRISRHLHRISFTPSFEQGDWSCGVCRKKIDNDCGGYSCGNSGCTYVAHSKCATQSNVWDGEDLEGKPEAIDEIGVNPFVRISLGIIQHFSHQQHYLRLDDNTGRDYDESKLCQACITPIYFGKFYSCMECNFILHEECANFSRKIQHPIHPHLLTLVTSATDKANTHDLCSACPWLFTTGFFYECHREGCRFNLHVRCGTISEPLVHGSHRHPLFLTSKPGDWRTCSVCKESSRYVTHETFNCVQCVFALCFKCAAIPQKVRYKHDNHVLILSYGKEIETSTMAYWCEA

SEQ ID NO: 1327 - DNA, 2085 bp, Arabidopsis thaliana
  CDS (1)..(2085)
atggaagcaccttctccttttttttctagatctaaacccaaatgtcgtctgtccgatccggctcagccgctcaaccttttccggcttggatgctcctcgagcaaaggcaatgatatggaagacacacctcctccctttttttctacatctaaacccaaatgtcgtctgtccgatccggctcagccgcacaagctttgccggcgtggataccgttctcatcctcgactttctatgtgcttttcgtgcaaaggcaaggatatggaagacagtaggtactattactactgtgttacatgcaaattggaattccacagaggttgtcacgtctttccaccggagataaaacacatttttcacccctctcaccctctaactctcatttccgtagatccgacttttgatttttcaccccgaaactggaaagacaagtcctctacagaagaatcgatatatgaagttgatgatgattgtgaagacgacgacaacgatgatgatgatgatgatgatgatgatgatgatgataacgatgatgatgttgttgatgatgatgatgatgatgatgatgatgatgatgatgttgttgatgatgattatggtgatagtgcctgtttatctgatggaaatcacctgaaatgcaaatgttgtcaggttccactacaaaaggtatattatcattgttctatctgcaagttctatcttaatgcgacttgctcgatgagaccaccacctcccactatctcacacatcaaaagtcatgagcacaccctcaccctcttccctatacgacttccttttccttgtgatgcatgtggcttgtctctaagcgagaccgatgatcttgtttacgcttgtctcccttgcagccacatggtccacagatcatgtatctatctacctcgtgtcattaagatcacccgacacccacaccgtctctctttcagtttatcccttcaacctggtgatttcttatgtggagtctgtcgccaaaccatcgacgtcaacaacgggcaatactcttgtaataagggatgtcattatgctgtccattcaaaatgtgcaacgagaaaagaggtttgggatggaaaagatcttgaaggagtgcctgaagaacccgaggaatatatggagtcatttgttaggattgatgaggagacaattcaacatttcagccatgagcattatctaaagctttatgaaaagaacaatatttgtgagaaagacaaggtatgtgaggcatgcacccttccagtaatgatctctcagagatattatggttgtatgaagtgtgattttgttctcgatgaagcatgtgcatttcttcctcgcaaaaaataccacccattacataaacacccacttacgctccacgctttcccacttggtcggatctccgggttcggtcatctgtaccactcggcaagcaacatattcatatgtgatggttgcagccgaattggttgtggttttgtgtacaaatgcggtgaacaagattgtacatttctcgtagacgtcaactgcgcttctcttccagatcctttcattcatggttgtcatccacatgatctctttttcaatttgacggaaggtaaatgcatggggtgttcaagtgattattgttcatcctattacctagaatgcattaaatgcacttcttttttgggtattagatgtgctactttgcctactaaggcacactacaaatacgataggcatccactcaccctatgctacggtgatgaagatacaacaagtggccaatattggtgtgagatatgtgaatcaaaattagatgcaagcaaatggttttatacatgtgaattttgcagcatcactctccatgtcaactgtttacaagggaaagatatgtacatgaagccccactacatcttcaaattggtttctggtagatatgaagttgaaattgctcgaaatgatggtaacactcggccactttgctctcaatgtaatcttctttgtgcacagactttggtattcaagcagataggcagatacgaaagttgttgtactcttgattgtctggcaaattacatttggaaattagcattggccaaaagagaaaggtga

SEQ ID NO: 1328 - protein, 694 aa, Arabidopsis thaliana
MEAPSPFFSRSKPKCRLSDPAQPLNLFRLGCSSSKGNDMEDTPPPFFSTSKPKCRLSDPAQPHKLCRRGYRSHPRLSMCFSCKGKDMEDSRYYYYCVTCKLEFHRGCHVFPPEIKHIFHPSHPLTLISVDPTFDFSPRNWKDKSSTEESIYEVDDDCEDDDNDDDDDDDDDDDDNDDDVVDDDDDDDDDDDDVVDDDYGDSACLSDGNHLKCKCCQVPLQKVYYHCSICKFYLNATCSMRPPPPTISHIKSHEHTLTLFPIRLPFPCDACGLSLSETDDLVYACLPCSHMVHRSCIYLPRVIKITRHPHRLSFSLSLQPGDFLCGVCRQTIDVNNGQYSCNKGCHYAVHSKCATRKEVWDGKDLEGVPEEPEEYMESFVRIDEETIQHFSHEHYLKLYEKNNICEKDKVCEACTLPVMISQRYYGCMKCDFVLDEACAFLPRKKYHPLHKHPLTLHAFPLGRISGFGHLYHSASNIFICDGCSRIGCGFVYKCGEQDCTFLVDVNCASLPDPFIHGCHPHDLFFNLTEGKCMGCSSDYCSSYYLECIKCTSFLGIRCATLPTKAHYKYDRHPLTLCYGDEDTTSGQYWCEICESKLDASKWFYTCEFCSITLHVNCLQGKDMYMKPHYIFKLVSGRYEVEIARNDGNTRPLCSQCNLLCAQTLVFKQIGRYESCCTLDCLANYIWKLALAKRER

SEQ ID NO: 1329 - DNA, 1968 bp, Arabidopsis thaliana
  CDS (1)..(1968)
atggctacagaagcagtagacctaccaattcatgagcaccctctttttccttcggctcgatgtattgatgatgaatgtgatggctgccatgtaaatggtttcatgtacgccggctacttttgcaatgaaccttactgttatgtttggttccataaggactgtgctgaggccccaggggagatcagccatagttcccaccctgaacatcctctcctgctcaccaatgactcgaaagatggtccatgtgatttgtgtggacaaaagctattgactccctgttatagttgtcccacatgtgagttcaaggtggatttgacttgtggtatgaaaccgtcaccgcctgctatcgaacatccgctgtgtcatgatcatgctgtcgtcttcttgaagatacgagaggagaaggttccttgtgaattatgcaaggagtctattgaaggtccatcctattcatgtcttgaatgcgatatgtatttccacgtgaactgcgtccatctctcggaagaggtaaatcatccttgtcattctattcatcctctcaagttaatcacatctgagtcacttacggatgatgccgagaaaagttgtcttttatgtggaaatataccagctgaaaatatgctttatcattgttccgtttgcaatttcacatcgtgccttggttgtaccaaaaacccaccactccttgttattgagcatatgaagacccacaaacacccacttactctcttacctagaagaatctcatgtatctgtgacgtttgtgggaagaaatgccagtttacggcgtatgtatgtcttcagtgtgattttgttaccgcaagaaagtgtatcgacaggccccgtgtcatcaatatcaatcgtcatgatcatcgcatatatttaactcatcatctcggcactgggtattcggaatgcggagtttgtcacaaaaatgtaagtcagtacaagggggcttactcttgctctgtttgccctaactatgctgttcattctacatgtgccgtgagaactgacgtatgggatggcgtagaattggaagggaccactgagatcacagaagacatttcaccattcaaggtggtgggtgataacttgatatgccattttagtcatgaagagcatcaattaaagcttcacaaagaagacgtcattcatgatgagcgcagacgctgtgaagcatgtatccatccagttcaatttggctccatctatgtttgtgaagaagaggaatgttgctttgttctccatgaaaagtgtgctaatcttcctatgaagaaaagacttgtctttggcaccagaccgtacacattaatgaaagaaactaccgaaattacacactgcgagttgtgtggaatattatctgatggtttcgcgtacagctcccatgagtggtcggatgtagatgtgcattgtggttcccttaatgagccgctcgtccatgatggccatatacatcccttatattttgcaaaaaaagaggaacacacttgcgatggatgccaaaagagtatagaagattatatgcttcgttgtaaagcttgtgactttgatttgtgtttgtattgtgctactttaccagaaaagatttggcataggaacgatgggcaccctctcactttatgttgtggtgagaaggaagaggcgagcggtaaatattggtgcgacatttgtgagaaggaattagatccaagtatatggttctatacatgttatgattgtggagtcaccttgcatgctcagtgcgtactaggagatttctcacgtctcgtgctaggacaaatctactcctttggggaaaaagaaatcgagtttgaggcggttcctaacaatatcaacactcggccattttgcatccagtgtaactctcgatgcaaggtctccgtcatcctaaagatcctaaatgatcacaatgggtatatctgctcccgatcatgtttatcgagttatttgggtgaagaaatttga

SEQ ID NO: 1330 - protein, 655 aa, Arabidopsis thaliana
MATEAVDLPIHEHPLFPSARCIDDECDGCHVNGFMYAGYFCNEPYCYVWFHKDCAEAPGEISHSSHPEHPLLLTNDSKDGPCDLCGQKLLTPCYSCPTCEFKVDLTCGMKPSPPAIEHPLCHDHAVVFLKIREEKVPCELCKESIEGPSYSCLECDMYFHVNCVHLSEEVNHPCHSIHPLKLITSESLTDDAEKSCLLCGNIPAENMLYHCSVCNFTSCLGCTKNPPLLVIEHMKTHKHPLTLLPRRISCICDVCGKKCQFTAYVCLQCDFVTARKCIDRPRVININRHDHRIYLTHHLGTGYSECGVCHKNVSQYKGAYSCSVCPNYAVHSTCAVRTDVWDGVELEGTTEITEDISPFKVVGDNLICHFSHEEHQLKLHKEDVIHDERRRCEACIHPVQFGSIYVCEEEECCFVLHEKCANLPMKKRLVFGTRPYTLMKETTEITHCELCGILSDGFAYSSHEWSDVDVHCGSLNEPLVHDGHIHPLYFAKKEEHTCDGCQKSIEDYMLRCKACDFDLCLYCATLPEKIWHRNDGHPLTLCCGEKEEASGKYWCDICEKELDPSIWFYTCYDCGVTLHAQCVLGDFSRLVLGQIYSFGEKEIEFEAVPNNINTRPFCIQCNSRCKVSVILKILNDHNGYICSRSCLSSYLGEEI

SEQ ID NO: 1331 - DNA, 1632 bp, Arabidopsis thaliana
  CDS (1)..(1632)
atggatgtaggacgatgccccacttgtcaatctcctctaaaatacacaaaactctcatcgaaatgtgatgcgtgctacgaagattaccatgacaacaaacaaggctacaagtgtgattactgctcgttttgtctccacgaggaatgcattaacgctaaccttccttctcgtcataaacaccctctcaaggtcacaaatagctataactcaaagttatgttatctttgtgaaaccaaaaggtatcctcaaatactttatcactgttcacaatgttctttcagtatatgtatcccttgtgcgagaaaacctatcatctttgaccaaactaaggctcatgaccatgaactcgtccaagtaatgataaaaatccccttcacttgtgatgcatgtgggttgtgtagtacagaatatccgtgtctttgtcttcaatgttgtttcatgatccatcgagcttgcatcttcttaccacgtgttatatacatcaaccgtcatgaccatcgtatctctcatgtttcttctctttccactgggaagtggatttgtagggtatgttatgagcatgtcaatgaagactatggggcatatgcttgctcgatttgttcttatttttttcattcaaaatgtgcaacaaatacaaacatttgggatgggagagaacttgaaggggtacccgaagaagatgaaaaagaagaaatcaaaccattcgaagtgatagatcaaaccctaataaaacattttagccatgaacacaatctcaaggcttctatatcatcatcgagactagaggaaccaagagaacgttgttgtgcatgcactcttcctttttattctgaaatgtgctataaatgcacacaatgtgattttattcttcatgattcatgcgctaatcttcctctaaagaaaagacatgagataagcacacacaaacttatgttatgtaccaaaagtcagcttggcgcaaacttcgaaaattcgtttttttgtgttacatgtcaacgttattgcactggtttctcatataatattactggggatgaaaacaacacccaacatagcattgatgtgcgatgtgcttcaatttccgatgcatttaaacatgaaagtcatccacattggctatttgtattttttgatttgttttactcaaggtgtgaaggttgtgacttgaattgttggttttatctacgttgcaaggataaagatgattgtggtggctacaatttatgtttcacatgcgcaactttacccacattggtaagagataaatatgatgatcatcctctttcattatgctacggtgagaaaaatgtgaatgcgagatattgttgcgggatatgcgaagaggatgtacattcaaagagttggttctacaaatgcaatgaatgtggctccactcttcatactaaatgtgtatttcaaaatctaatacactcaaggtctggatacagtttagtgattggtaacaaggggtcatttgatttgcttccaaacaatcgtctctctcggccaatttgctatttatgcaagatccgttgtatgggtgattttgttctccacaaaaaggcggatacaagtatattcatatgctgctcttgtggatttaattataaagatttggttaggaggtattga

SEQ ID NO: 1332 - protein, 543 aa, Arabidopsis thaliana
MDVGRCPTCQSPLKYTKLSSKCDACYEDYHDNKQGYKCDYCSFCLHEECINANLPSRHKHPLKVTNSYNSKLCYLCETKRYPQILYHCSQCSFSICIPCARKPIIFDQTKAHDHELVQVMIKIPFTCDACGLCSTEYPCLCLQCCFMIHRACIFLPRVIYINRHDHRISHVSSLSTGKWICRVCYEHVNEDYGAYACSICSYFFHSKCATNTNIWDGRELEGVPEEDEKEEIKPFEVIDQTLIKHFSHEHNLKASISSSRLEEPRERCCACTLPFYSEMCYKCTQCDFILHDSCANLPLKKRHEISTHKLMLCTKSQLGANFENSFFCVTCQRYCTGFSYNITGDENNTQHSIDVRCASISDAFKHESHPHWLFVFFDLFYSRCEGCDLNCWFYLRCKDKDDCGGYNLCFTCATLPTLVRDKYDDHPLSLCYGEKNVNARYCCGICEEDVHSKSWFYKCNECGSTLHTKCVFQNLIHSRSGYSLVIGNKGSFDLLPNNRLSRPICYLCKIRCMGDFVLHKKADTSIFICCSCGFNYKDLVRRY

SEQ ID NO: 1333 - DNA, 1461 bp, Arabidopsis thaliana
  CDS (1)..(1461)
atgtatttcccatctgatcacgctagacacatatttgaagaatctccacgcgattctagagatgcaatttgcaaattgtgtaaaagtacggtttcttttgaatctttcgcatattattgtcgtgaatgtagatcccatttccataaggattgtctcacaataatcaatgcaaagattcatgagcatacactaactttcattcgtagagagaatccgttcccttgtgatgtttgtgggagggatgataaaggtatggatatgtacggatgtttacaatgcgatttctttgtacatagacagtgtatattcctaccaaaggttataaagctcacacgtcactcacagcgtctctctcacgtttttcgtatctctgatggtgataacatttgtggagtttgccggagccaagttgatgttagatatggaggatattcttgtattgagaagacatgtaattatgttgtccattcaagctgtataattcgttttgatgtgtgggatggcaaagatcttgaagaagagcctgaaccagaggagattgactctcaagttgatcttgctgcgttggtggaaatagatggaaaatcagtacgccattttagccatgaacatgatttattgagactcgatatgggcgaaaaagaagaaagtggacaagtatgtcaagcctgtgtccttccaattgaatttggtagtttcttgggttgcaagcaatgcgactttgctcttcacgacgtgtgtgcgagtcttcctcggaagatggaacatgggatacatattcatccgcttaccatacatgttgacgcgatgaacaacgaaaatgggttcttcacttgctctgtatgtaaccaacattcttgcggattcatgtacaagtgttgccaagaagattgtgagtttaaaatagatgtgaagtgtgcttcttttgccgaaccattcgaccatagtatgcataaacatcctctttatctggctatatactttgatgaatttatttacaggtgtgaaggttgcactcaatcttcaagatttgcagcaaaatgttacaaaggatgctggtttcccttggagttcaaatgcttgaatttaccaaaactggtaaaatacaagtatgactcgcactcactcactctatacagtgataaatattactcgaagagttttcagcttgagtggtggtgtgagatttgcgaagaaaatataaacaaaaagaaacttttctacacctgccatgaatgctgcacgactctacatgttgaatgcatcttagggaaatacccttatttgaagtctggccataggatcaaagttagtggtttggaggtcgagattgcttcaaacaatggtgtttctcggccggtgtgtcatacatgtcaccgtatttgccaagacaaaaaaaaatttaatggaaaagatgatgtatatttttgttctatcaagtgtattcattctaccaaatga

SEQ ID NO: 1334 - protein, 486 aa, Arabidopsis thaliana
MYFPSDHARHIFEESPRDSRDAICKLCKSTVSFESFAYYCRECRSHFHKDCLTIINAKIHEHTLTFIRRENPFPCDVCGRDDKGMDMYGCLQCDFFVHRQCIFLPKVIKLTRHSQRLSHVFRISDGDNICGVCRSQVDVRYGGYSCIEKTCNYVVHSSCIIRFDVWDGKDLEEEPEPEEIDSQVDLAALVEIDGKSVRHFSHEHDLLRLDMGEKEESGQVCQACVLPIEFGSFLGCKQCDFALHDVCASLPRKMEHGIHIHPLTIHVDAMNNENGFFTCSVCNQHSCGFMYKCCQEDCEFKIDVKCASFAEPFDHSMHKHPLYLAIYFDEFIYRCEGCTQSSRFAAKCYKGCWFPLEFKCLNLPKLVKYKYDSHSLTLYSDKYYSKSFQLEWWCEICEENINKKKLFYTCHECCTTLHVECILGKYPYLKSGHRIKVSGLEVEIASNNGVSRPVCHTCHRICQDKKKFNGKDDVYFCSIKCIHSTK

SEQ ID NO: 1335 - DNA, 2205 bp, Arabidopsis thaliana
  CDS (1)..(2205)
atgaattctgttggtgtatttcgtaaggaggaaattgatggaaaatcatttttggtatacacattaacacaaacagacaacccaacttcctccggtgaagcactagccatggattctggtggcgacgacctccctcttcaacctctttttttctgtcctgctgcacgtatcaattttcataagctcagactaaagatgcacaatcatgatgatgatgatgatgctgaagatgacgataacggagatgacaaagaagatggcgatgatgacaacaaaggtgatgatggtgatgatgacaacgaagatgacaacgaagatgatgacaacgatgatgatgatgatgatgatgatgatgatgatgatgatgatgatgatgatgatgatgatggtgatgatgacaacgaagatggcgattgcgatgacgatgacggtgacttgcttcttccattcgattccacccctcacttccccagcacaagaagtggtgatcaacaaggtgaatctttgcttgattgcaaccacccagacgtttgtaagctccctgtagtccctcttttttggtgcaacaataaagaacgttctactgttggattcgagtgcggtgcatgtaaaatgacaacgctctgcgaaagctattttgcatgtctccaatgccaaggaaagttccacaaagaatgtgttgagtctccacctgagatcaaacacccttcccacccctttcattctcttcgactttgcagttttcaaacgaggcttactagcggttgttgtagaaaaattacctttggcatgttttatcagtgtacaacctgcaatttgagtatgcatcccgtctgtgcgatgaggccagtacccttggttgtagaccatcctaaaagccatccccatcctctctcctttttccctacacaagcttctacagtttgccatatttgtgccaagattaagcatcttgatcccacatatatctgtatccaatgtgtcttcgtaatccataaaggttgtatgggtttcccacataccataagaatatctcgtcaccctcaccgtatctcttttacctcttcccttccatctagaacgctgtcttgtggagtctgtcatcaacaagttgacaacaattatggtgcatactcttgcaataattgtgacggttattttgttcattcaaaatgtgcaatacatccaaaagtgtgggatggaaaagaactcgaaggagtaccagaagaagatgatttgatagacgatggtgagccgttcgagaggatatctgatggaattatacaccatccttttcatagtcaccacttgcgacatgagatgagcataacttatgatgaaagtaagtattgtcaagggtgtgctcttccaatctatgaaggtcagttttattcatgcatggaatgtgacttcatcctccatgacagttgtgcaaatgctccacggatgaaacggtatcctttatatccacatccaataacacttaaatttgccaccgtgagaaataatagtttcacaagtcaatttcgttgtgctgtatgtgatcgtcatggtaatggtttcttctatgagcatcacggcgaagataaaatgttccggctagatttacggtgtgccttgattaccgaaccgttggtatatcaaggccacatgcatcccttattcctactgtgggacgacacagagagtctgataagttgtcaaatgtgcaaaaagaaaagctactattcacaactgttttgcctggaatgcgagtattctctatgtttgcgttgtgttaccttcccatataaagtaaggtataagcatgatagtcattttctcacaatttgcgatgtgaaggaggcaagtgatgaactagactggtgtgacatttgtgaaggcaaaatagaagaagagaaagaaaaggaatataattgggatgatagagaaagagagctacgattctataaatgcaatgattgtagcactgctcttcatgttgattgtttgcttggtgtagacatgtacatgaaacctattacagactacatttctgtcatcacgctcacatctaagggtacgaaacggaaagatctttggatttttcttaacaactctctcactcgaccaatttgcactacatgcttaagtcgttgtccattcccaatatttttcaaagggcacaccaaaatcttctgttctttgtattgtagtgaggactga

SEQ ID NO: 1336 - protein, 734 aa, Arabidopsis thaliana
MNSVGVFRKEEIDGKSFLVYTLTQTDNPTSSGEALAMDSGGDDLPLQPLFFCPAARINFHKLRLKMHNHDDDDDAEDDDNGDDKEDGDDDNKGDDGDDDNEDDNEDDDNDDDDDDDDDDDDDDDDDDDDGDDDNEDGDCDDDDGDLLLPFDSTPHFPSTRSGDQQGESLLDCNHPDVCKLPVVPLFWCNNKERSTVGFECGACKMTTLCESYFACLQCQGKFHKECVESPPEIKHPSHPFHSLRLCSFQTRLTSGCCRKITFGMFYQCTTCNLSMHPVCAMRPVPLVVDHPKSHPHPLSFFPTQASTVCHICAKIKHLDPTYICIQCVFVIHKGCMGFPHTIRISRHPHRISFTSSLPSRTLSCGVCHQQVDNNYGAYSCNNCDGYFVHSKCAIHPKVWDGKELEGVPEEDDLIDDGEPFERISDGIIHHPFHSHHLRHEMSITYDESKYCQGCALPIYEGQFYSCMECDFILHDSCANAPRMKRYPLYPHPITLKFATVRNNSFTSQFRCAVCDRHGNGFFYEHHGEDKMFRLDLRCALITEPLVYQGHMHPLFLLWDDTESLISCQMCKKKSYYSQLFCLECEYSLCLRCVTFPYKVRYKHDSHFLTICDVKEASDELDWCDICEGKIEEEKEKEYNWDDRERELRFYKCNDCSTALHVDCLLGVDMYMKPITDYISVITLTSKGTKRKDLWIFLNNSLTRPICTTCLSRCPFPIFFKGHTKIFCSLYCSED

SEQ ID NO: 1337 - DNA, 2319 bp, Arabidopsis thaliana
  CDS (1)..(2319)
atggattcagattcggagttgaggctcttatcactcatttctcagttactgtctcccagcaatacagactcagatgccatatcaaacatgattcaaataatctctatggtcagctcattggatttgaatacgcagccgaagccgcagtcgaagctcatgtcactcattacagaaacaatctccctcttcaactccatgaatttggattcccagccggagccgctaaggaagcttgtatcactcagtattcaaaaagtatctcaccttaattctgtaggttccgattatgagccgaagccggatccagagttcatgtacatgttctatgaaacattcaaccttgagccgatgccaaagcttatatcaaccatcgatcaaatatactccctctttatcttgccagatccagagccaaaaccgaagccggagatggatccagagcaagagtcaaagttcatatcactcctttctcaaatatactcaatctttgcgattaagacaaatgcggagttggagttgcggggtgggccggaggagttgccaaaatttaaatcattcatatcacttaccaaacaactaatgtctctcattagttctctagatttggagacggagccggagccagagtcggagttcatttcagtagtatcatgcattaagcaaataatctcttttgcccactctatatcaaactcggaaccagatttcatatcaagcacaactgaaatgttccgtctcattagctctatagatctggaagaggagccaccgatgaagctagcggcactttttcaacacacgctttctcttctctactcaatggatcgggattcagagctcataatcctcattggtaaaataatatctgtcatcgatcgtacggattcggagccggaggccgaatgggggctggaacagcttatttccttgtcccctcaaactaaagtaaaacttgtacaaggaaaatttcatgtaacggggaaaatcgagcggacgagcaaagaaaagggaagatgtcaacccaaaaacaaacatagactctacctagaaagcggagaagatgcttcccactttctttgcaaagattgcaacggcgaggaccatgtagaatgtgaaaagacaccggttgaggtaaaacaccttcttcatccaaagcattctctccagcttgttttgcagaagtcgtcgataactcaaaccagaaaatgcttttgttgtgatgaagatctcaaattgatattttattattgcacggtttgcgattatgctatgaatatagcttgtgcagagaagccaccagtcttatttatagaccatcccaagtggcatgcagatacacttgctctgtttccaagacaagctttcttaacctgcaatgtatgtgctgtggccgattccagctcccctatctatatgtgtcccccttgtgattttgtggttcatctaaaatgtatcagcttaccacgtgtcataaggatatctcgccatcaacatcgtatctctttcaccacttctttcgacgaaggagattggtcttgtggtgtttgtcggaaaacaatcgacaacgattatgggggttattcttgtatcaaggacggttgttcatatgcagcacattcaagatgtgccacacaaaaaaatgtgtgggatggcatatatcttgagggagtgccagaagagattgaagaagaagaagttgagccgtttgtgacaataagcaaaggagtaatacaccattttagtcatcagaatcatcatttgaggcttgatgagaacgaaggcagagtttacgacgaaaataagatatgtcaagcatgcatcatgcccatctatttcggtaacttcttctcatgtatgcaatcttgtccttggccgtgcatagctggtttcttctatgagagttgtaaagaaggatgttcttttaagcttcatgtgcagtgcgccacgatttccgagccactactccatgaaagtcataatcattctttattcctaacatctaaaccagaagagcaaagatcatgttccgtttgcaaagattcaaggcttgaattcacaaatgaaacattcaattgcattgaatgtgaatttgctttgtgttttggatgtgctactttacctcaaaaggtgaggtataagcatgataagcatattctcactctttcttatggaaaggagacaagtaccatgacatattggtgtgaagtctgcgaggagaaagtaaatccaaaagaccggttttatatgtgtgatgattactgttgtgttaccctacacatgagatgtctgatgattattcgatctaatagtaaagtttaa

SEQ ID NO: 1338 - protein, 772 aa, Arabidopsis thaliana
MDSDSELRLLSLISQLLSPSNTDSDAISNMIQIISMVSSLDLNTQPKPQSKLMSLITETISLFNSMNLDSQPEPLRKLVSLSIQKVSHLNSVGSDYEPKPDPEFMYMFYETFNLEPMPKLISTIDQIYSLFILPDPEPKPKPEMDPEQESKFISLLSQIYSIFAIKTNAELELRGGPEELPKFKSFISLTKQLMSLISSLDLETEPEPESEFISVVSCIKQIISFAHSISNSEPDFISSTTEMFRLISSIDLEEEPPMKLAALFQHTLSLLYSMDRDSELIILIGKIISVIDRTDSEPEAEWGLEQLISLSPQTKVKLVQGKFHVTGKIERTSKEKGRCQPKNKHRLYLESGEDASHFLCKDCNGEDHVECEKTPVEVKHLLHPKHSLQLVLQKSSITQTRKCFCCDEDLKLIFYYCTVCDYAMNIACAEKPPVLFIDHPKWHADTLALFPRQAFLTCNVCAVADSSSPIYMCPPCDFVVHLKCISLPRVIRISRHQHRISFTTSFDEGDWSCGVCRKTIDNDYGGYSCIKDGCSYAAHSRCATQKNVWDGIYLEGVPEEIEEEEVEPFVTISKGVIHHFSHQNHHLRLDENEGRVYDENKICQACIMPIYFGNFFSCMQSCPWPCIAGFFYESCKEGCSFKLHVQCATISEPLLHESHNHSLFLTSKPEEQRSCSVCKDSRLEFTNETFNCIECEFALCFGCATLPQKVRYKHDKHILTLSYGKETSTMTYWCEVCEEKVNPKDRFYMCDDYCCVTLHMRCLMIIRSNSKV

SEQ ID NO: 1339 - DNA, 2580 bp, Arabidopsis thaliana
  CDS (1)..(2580)
atggattcagagtcagagtcaaagctcatatcattcatttctcaattagtgtctcgcaacaatacggactcggagaacatatcatgcatgatacaaacaatctctctggtcagctcaatggatttgaagtcgcagccgaagccggagtcgaagctcatgtcgctcgttactcaaacaatctctctcttcaactccatggatttgagttcccaacccgagccactgaggaagctcatatcactcattattgaaaaactgtctcacctcaactcggtagattccgattatgagccaaagccagactcagagttcatgtcaaccttttatgaaacatacaagctccagccgaggccagagatcatatcaatcatccatcaaatatactccctctttatctccacagacacaaagtcaaaaccagagccggaggtggattcagagttgatgtttgtccacagctctatggattcggattcagattcagattcagatttggattcggaggaggaggaggaggaggagttgatatcactcctttctgaaatgtactcactctatgcgtttactacaaatgaagagttggagttgcggggtgggccagaagagttgccaaaattcaaatcattcatatcgcttacaagtaaagtaatcactctcgtacgctctcttgatttggattattcagagccggagccagagtcggagttcatttcagtggtagcagtcgttaagcaaataatgtcttttgccaactctatatcaaattcagaaccagagtggcagttcatatcaagcatgactgaaatgatccgtctcattagctctatagatctagaaccagagtgggagccaccaatgcagctagtggcactctttacacacacgttttctcttctctactatttggatcgagattcagagctgtatacactcattgctcaaataatttttatcattgattataccgattcggagccggagtcggaatgggggctagatcagcttatgtccttgtcccctcaatggaaagtacaacttgtacaaggaaaatttcatgtaacgggaaaaatcgagcggaagaacaaagaaaaggggaaatgtcaacccgaaaaccggcatagactctacttagcgaaaggagaggaggcttcccactttatttgcaaagattgcaacggcgaggaccatatagaatgtgaaaagacaccagttgaggtaaaacaccttctacatccaaagcattctcttcagcttgtctcacagaagtcgtcgataattcaaaccagaaaatgcttttgttgtgatgaagatctcaaaaagatattctattattgcacgggttgcgattatgatatgaacatagcttgtgcagagaagccaccagtcttatttatagaccgtcccaagtggcatgcagatacacttgctctgtttcaaagacaagctttcttaacctgcaatgtatgtgccgtggccgattccagctcccctatctatatgtgtcccccttgtgattttgtggtccatcaaagatgtaccggcttaccacgtgtcataaggatatctcgccatcgccatcgtatctctttcaccacttcttttgacgaaggagattggtcttgtggtgtttgtcggagaaaaattgacaatgattatgggggtttttcttgtatcaaggacggttgttcgtatgcagcacattcaagatgtgccacacaaaaaaatgtgtgggatggcatagatcttgagggagtgccagaagagattgaagaagaagaagttgagccgtttgtgacaataagcaaaggagtaatacaccattttagtcatcagaatcatcatttgaggcttgatgagaacagagacagaatctacgacgagaacaagctatgtcaagcatgcatcatgcccatctatttcggaaatgatgatgttaggaagtacgaggataagtgttcagcttgtccttggccgtgcatagctggtttctcctatgagtgtcgtaaagaaggatgttcttttaagctacatgtgcagtgcgccacgatttctgagccattagtccatggaagtcatattcatcctttattcctgacatctaaaccaggagagcaaagatcatgttccgtttgcaaagattcaaggtttgaattaacaaatgaaacattcaattgcattgaatgtgaatttgctttgtgttttggatgtgctactttacctcaaaaggtgaggtataagcatgataagcatattctcactctttcttatggaaaggagacaagtaccatgacatattggtgtgaagtctgcgaggagaaagtaaatccgaaagaccggttttatatgtgtgatgattactgttgtgttaccctacacattagatgtctgattggaaaggacctatacatgaagcctggtgcattgtgtttctccaatgacggaaaagagctgcgtgttctaccaaacaatcatatgtctcgaccattttgcccaggttgtaggaagcgttgtccatacaaaatatttatggtgtatactcgattaatattttgttccatatcttgtattcgtgatttttag

SEQ ID NO: 1340 - protein, 859 aa, Arabidopsis thaliana
MDSESESKLISFISQLVSRNNTDSENISCMIQTISLVSSMDLKSQPKPESKLMSLVTQTISLFNSMDLSSQPEPLRKLISLIIEKLSHLNSVDSDYEPKPDSEFMSTFYETYKLQPRPEIISIIHQIYSLFISTDTKSKPEPEVDSELMFVHSSMDSDSDSDSDLDSEEEEEEELISLLSEMYSLYAFTTNEELELRGGPEELPKFKSFISLTSKVITLVRSLDLDYSEPEPESEFISVVAVVKQIMSFANSISNSEPEWQFISSMTEMIRLISSIDLEPEWEPPMQLVALFTHTFSLLYYLDRDSELYTLIAQIIFIIDYTDSEPESEWGLDQLMSLSPQWKVQLVQGKFHVTGKIERKNKEKGKCQPENRHRLYLAKGEEASHFICKDCNGEDHIECEKTPVEVKHLLHPKHSLQLVSQKSSIIQTRKCFCCDEDLKKIFYYCTGCDYDMNIACAEKPPVLFIDRPKWHADTLALFQRQAFLTCNVCAVADSSSPIYMCPPCDFVVHQRCTGLPRVIRISRHRHRISFTTSFDEGDWSCGVCRRKIDNDYGGFSCIKDGCSYAAHSRCATQKNVWDGIDLEGVPEEIEEEEVEPFVTISKGVIHHFSHQNHHLRLDENRDRIYDENKLCQACIMPIYFGNDDVRKYEDKCSACPWPCIAGFSYECRKEGCSFKLHVQCATISEPLVHGSHIHPLFLTSKPGEQRSCSVCKDSRFELTNETFNCIECEFALCFGCATLPQKVRYKHDKHILTLSYGKETSTMTYWCEVCEEKVNPKDRFYMCDDYCCVTLHIRCLIGKDLYMKPGALCFSNDGKELRVLPNNHMSRPFCPGCRKRCPYKIFMVYTRLIFCSISCIRDF

SEQ ID NO: 1341 - DNA, 1869 bp, Arabidopsis thaliana
  CDS (1)..(1869)
atggattctcccgagtcgaagctcatatcacttgctactcagctcatctctctagacaactcttcggatttggagctcgtatcatgtactattattcaaataatatctctcgttagctcaatggatttggattcgcagccgaagcccgagacgaagctcatgtcactcatagctcaaacaatctctcttttcaactccatggatttggattcccagccggagccgttaaggaatctcatatcactcattactcaagaattatctctccaaaactctatagattctgattctgagccaaagcctaattcacaggttatgtcactctactctgaaacattcaaactcaagccgagaccggagctcatatcgatcatcgttcaaatatacagtcttttcatgtcgccggagccggatttcacagattcagattcgggttcgagttcagattcggagatggagtcaaagctcatatcagtcatttctcaaatactcacagtcgacacggttgtggtaacgggtgaggagttggatgagtcgcaaaagatgtcaaaaacgaaatcacttattttacgttttagtcaactaatctctcttgtcagctctatggacttggattcggagccggagccagagtcggagctcatatcactcattaagcaaataatatctttcagcaactcaatatcggattcaaaccagaaagtgtttctgttatgtatcaacttaccacgtgtcataaggatatctcgccacccccatcgcatctcttttacccctttgttcgaccaacgagatagatcttgtggtgtttgtcgcgaaactatcgacaacgattttgggggttattcttgcatcaaggatgattgttcgtacggagcacattcaagatgtgccacacaaagaaatgtgtgggatggcatagagcttgaaggggtgttagaagagattgaagaagaagttgagccgtttgtgacgataagtgatggaatcatacaacattttagtcatcaacaacatcatttgagacttgatgagaacaaagacagagattacgatgacagtaagcagtgtgatgcatgcatcacaccaatctattttggtaacctctactcttgtatacaatgcagcttcattcttcacgaagaatgtgcgaatttatctcgcaaaatacatcacccgatacatccacctatgctctccctagtgggaggatataacgaagttagaaagtatgaggataagtgttcagcttgtccttggtcgtgcatagcaggtttcttctatgtgtgtgataaagaaggatgttattttaagattcatgtgcagtgcgctacaatttctgagccattagtccatgaaagtcatatggatcctttattcctaacatctaaaccaggagagcaaagaggatgctctgtttgcaaagattcaagacttgaatgtacaaatgaaacattcaattgcatcaaatgcgactttgctttgtgttttggatgtgctactttacctcaaaatgtgaggtataagcatgatgatcatattctcactctttcttatgggaaggagacaaatactgagacatattggtgtgaagtctgtgaggaaaaagtaagttcgaaagaccggttttataagtgtgatgaatattgttgtgtcaccttacacatcagatgtctgattgggaaggacttatacatgaagcccggttcattgtgtatctacaaggatggaagaaagctatttgtgttgcccaataatcatatgtctcgaccatcttgcacaggttgtaggaagcgatgtccatacaaaacagtgttggtgcttattcgattaatattttgttccacattttgtattcatcatgtttag

SEQ ID NO: 1342 - protein, 622 aa, Arabidopsis thaliana
MDSPESKLISLATQLISLDNSSDLELVSCTIIQIISLVSSMDLDSQPKPETKLMSLIAQTISLFNSMDLDSQPEPLRNLISLITQELSLQNSIDSDSEPKPNSQVMSLYSETFKLKPRPELISIIVQIYSLFMSPEPDFTDSDSGSSSDSEMESKLISVISQILTVDTVVVTGEELDESQKMSKTKSLILRFSQLISLVSSMDLDSEPEPESELISLIKQIISFSNSISDSNQKVFLLCINLPRVIRISRHPHRISFTPLFDQRDRSCGVCRETIDNDFGGYSCIKDDCSYGAHSRCATQRNVWDGIELEGVLEEIEEEVEPFVTISDGIIQHFSHQQHHLRLDENKDRDYDDSKQCDACITPIYFGNLYSCIQCSFILHEECANLSRKIHHPIHPPMLSLVGGYNEVRKYEDKCSACPWSCIAGFFYVCDKEGCYFKIHVQCATISEPLVHESHMDPLFLTSKPGEQRGCSVCKDSRLECTNETFNCIKCDFALCFGCATLPQNVRYKHDDHILTLSYGKETNTETYWCEVCEEKVSSKDRFYKCDEYCCVTLHIRCLIGKDLYMKPGSLCIYKDGRKLFVLPNNHMSRPSCTGCRKRCPYKTVLVLIRLIFCSTFCIHHV

SEQ ID NO: 1343 - DNA, 2067 bp, Arabidopsis thaliana
  CDS (1)..(2067)
atggctaccggtgtgacccatgtattccacaagacatgcgccaacaatacttacaatatcgcccacccttctcaaacgtgtgataacattcttaatcatacatacaactttaatataggcggagggagatgtgcagggtgtggagagaagatctacgatagcttaatctatatatgtaacaagtgtgttttagtacctctgagaaaaggaagatttggttcttcatatttccatttcaattgcgctaagtacccaccgtcggaggtcattgatgttcctcagcaccatgaccataaactcaagctagagatggtgaaaagttgcttctcttgtgccacttgtggaaaggatagtgatggatattcatacaagtgtcatgaatgcgatttgaagtttcatgtaaactgcgaaaagcatccggccgaggtaacccatttttcccatcccttacaccctctaaaactcgtcaaggttgaaccacctgcttataccgataagaaatgtcgtttgtgtggagaaaaacttgctaattctgaagtcttttatcattgttccgcttgtaactttagcttagatctccaatgtattttttatccaccaaaacaaaatcctcacgacccaaacatccatggccatcaactcacccttatgccaaaatccatctctttttcttgtacctcttgcgggctaaaaggagaccggagcccatatgtatgtcttccctgtgatttcacaagccacaatgattgctctggatttccatgggtcataaacatcaaccgtcatgaccatcgcgtttctcgcacttctcttattggtgtggtgaattcggtatgtggaatttgtcgtaagaatatggattggagttgtggaggttattcttgtaagaggtgtcccacctcagtgtttcataccaaatgcgttactagagaagatgtatgggatggcaaagaaatgaaagacgaacctgaagaagaggaagatattctaccgttcaaggttatcgatgaaaacacaatacaacatgttagccataaagagcataacctaagacttgacaagtctggtatcttcatcgaggagaggatttgtgaggcatgtgtttatcctatctatcaccactctttctatagctgcatgagttgtagtttcattctccacgagagttgcgcctatctgcctctatggaaaagacatgtagtaagcaatgaccgacataaatataaatattgggattattttataagatgtacggcatgtggattgttttccaatggttttagatacgaagcaatgcgcgcttcattggatttgcgatgtgcttcaattactgagccatttgtccacaaaagtcatcctcatcccttattttacacatcgccacgaggaatctgcattgtttgcaaaaaagaggcacaacatgtgctcagatgcgttgaagatgattgtgaatacatcatggactacaagtgcgctcttttaccatatgaggtaaagcataatggtaaatattggtgtgatatttgtgagaaagaaacagatccaaaaacatggttttacacctctaaagattgtgaacttactttgcatacgaattgtgtgctcggcgatttccgtggtctgaagccaagaaggaaagaaacaatctacgtccacgatgtcagtgtatattttgtggtggttcgcaacaacagtatgtctcgaccactttgcaaacaatgcaagtctcgttgcatattcccagtcatcttgaaaacatggaatgaaagttccctccgtaatgaatattattgctctgagttgttgaatatctgtatgattgatactcaatcaaaggatcaaggtaccaatattgttcctcagtcaaaggatctcggtgagactcattcatcaagatcgaaggatcatttcaactacaatttgatgggccggatcattgacaagctaaatacccggttttattatgacgtttttcctgtgataattactactgtacctgaatgttggaagtttttaaaagatttgttttatgccatgttcacaattgcaagaaaagaaaaaagataa

SEQ ID NO: 1344 - protein, 688 aa, Arabidopsis thaliana
MATGVTHVFHKTCANNTYNIAHPSQTCDNILNHTYNFNIGGGRCAGCGEKIYDSLIYICNKCVLVPLRKGRFGSSYFHFNCAKYPPSEVIDVPQHHDHKLKLEMVKSCFSCATCGKDSDGYSYKCHECDLKFHVNCEKHPAEVTHFSHPLHPLKLVKVEPPAYTDKKCRLCGEKLANSEVFYHCSACNFSLDLQCIFYPPKQNPHDPNIHGHQLTLMPKSISFSCTSCGLKGDRSPYVCLPCDFTSHNDCSGFPWVININRHDHRVSRTSLIGVVNSVCGICRKNMDWSCGGYSCKRCPTSVFHTKCVTREDVWDGKEMKDEPEEEEDILPFKVIDENTIQHVSHKEHNLRLDKSGIFIEERICEACVYPIYHHSFYSCMSCSFILHESCAYLPLWKRHVVSNDRHKYKYWDYFIRCTACGLFSNGFRYEAMRASLDLRCASITEPFVHKSHPHPLFYTSPRGICIVCKKEAQHVLRCVEDDCEYIMDYKCALLPYEVKHNGKYWCDICEKETDPKTWFYTSKDCELTLHTNCVLGDFRGLKPRRKETIYVHDVSVYFVVVRNNSMSRPLCKQCKSRCIFPVILKTWNESSLRNEYYCSELLNICMIDTQSKDQGTNIVPQSKDLGETHSSRSKDHFNYNLMGRIIDKLNTRFYYDVFPVIITTVPECWKFLKDLFYAMFTIARKEKR

SEQ ID NO: 1345 - DNA, 1917 bp, Arabidopsis thaliana
  CDS (1)..(1917)
atgaataatgaaaggaagaccacaaatatttgtagatttagaaagatcgcaagttcgcaacataaagcagttaagcaaatgggttttgaagatggaccaagatgtcttatgtctcatccagctcacccttctcataacttgtccgttcgatacagattcaactttcgtatcggttgctttacatgtggcgggaaagcagctgctacgacgccggattgtctctactactactgcaccacctgcgaggtgacgttccacaatggttgccatcaacgtccaagaaggataacacatccttatcacctccaacatcctcttactctcttctatcgaaaccccgaaaccagagttatatccaacatcatccctgatgcttgtcctggtaaaattgaggatacatcaggtccagagaagtatgaattcgtggatatcgtcccgtataagtctgatatcatattcaacaaatgcacttggtgtgcaaaagatttcaaaggtgattggttttatcgttgtttgatctgtagtttttgcttggatctctcttgtgcggcaactcttccacttcttactattacaaacccgaaaagccatcaccactctctcgtcttcttaccccggccattattagttccatgtgatgcttgtgggttggttgacgggttggaaccaagttatgcttgtttccaatgtaattacatggttcatcagaattgcatagacttaccccgagtcataaaaatcacgcgtcacccgcaccggctctctcatactccttattgttcatctttgacttcgtcatgccaaatctgctataaagaggttgatatcaagtatgggcaatattcttgccatctccaagattgtttttatgtagtccattctaaatgtgcaacacatgaaaatgtttgggatgggaaggaactcgagtgggaaatcgagtctgatgaaactgaagatatttcaccttttaggaacctaggtgatggtttcataaagcatttttgtcacaaacaccgtttgaagctcaagaatcatgatggtgctcgagacacagaaaagcaatgtcgagcgtgcatatatccaattgtttctcaccaattttaccattgcaagaaatgcaattactctctccacgaggtatgtgctggcctttctcgaaaactggatcatgcattgcacaatcacactcttatcctatctccatctcccggaaagttttgttgttcagcttgttcccgagaatccactggtttcagttacatatgctctaataaaggttgccaagattttgttctagatgttcgatgcatctcagtgctagagtatttcatccatagaagtcacgaacatcccatttttatctccacatcctacaacagtaaagacgagatcctctgcaaagtttgcaagaaaagatgtttgggggctcatctacagtgtacgttatgcgagtttactatgtgttactcatgtgctatcattccagatgaaatacactacaaatttgacaagcatcctctcaccctttcttgtggggaaagcgcggataacacgtattggtgcgaggtgtgtgaaaaacaattggatccaaaagaatggttctacacatgtaacaaatgttgcatcaccatccaccttcattgcatatttggatcttctgtctttatgaaacctggttccatatttcgtgattattatggaaaggtgcaagtttttcgaaacaatagtaacactcgacaactctgttatatgtgtcacaaccgttgtaccggtttgatcttctacgaaggctacagaaggaatgctacatattactacaatcatagcaatcgatcaactcatagaatgattttttgctctttggaatgtgagatattagggatgagaaaacgtcgtctcatccgtcttccgaggtaa

SEQ ID NO: 1346 - protein, 638 aa, Arabidopsis thaliana
MNNERKTTNICRFRKIASSQHKAVKQMGFEDGPRCLMSHPAHPSHNLSVRYRFNFRIGCFTCGGKAAATTPDCLYYYCTTCEVTFHNGCHQRPRRITHPYHLQHPLTLFYRNPETRVISNIIPDACPGKIEDTSGPEKYEFVDIVPYKSDIIFNKCTWCAKDFKGDWFYRCLICSFCLDLSCAATLPLLTITNPKSHHHSLVFLPRPLLVPCDACGLVDGLEPSYACFQCNYMVHQNCIDLPRVIKITRHPHRLSHTPYCSSLTSSCQICYKEVDIKYGQYSCHLQDCFYVVHSKCATHENVWDGKELEWEIESDETEDISPFRNLGDGFIKHFCHKHRLKLKNHDGARDTEKQCRACIYPIVSHQFYHCKKCNYSLHEVCAGLSRKLDHALHNHTLILSPSPGKFCCSACSRESTGFSYICSNKGCQDFVLDVRCISVLEYFIHRSHEHPIFISTSYNSKDEILCKVCKKRCLGAHLQCTLCEFTMCYSCAIIPDEIHYKFDKHPLTLSCGESADNTYWCEVCEKQLDPKEWFYTCNKCCITIHLHCIFGSSVFMKPGSIFRDYYGKVQVFRNNSNTRQLCYMCHNRCTGLIFYEGYRRNATYYYNHSNRSTHRMIFCSLECEILGMRKRRLIRLPR

SEQ ID NO: 1347 - DNA, 1512 bp, Arabidopsis thaliana
  CDS (1)..(1512)
atgagtctcacgttacaaggacacgagcatcgtgtatccctaatttaccatcgtgatggtattgaatgcgatgcttgcgatcgatcatatggtgttggcttctcttgcagtgaatgtaagtttactattcacatgaaatgtatattcgtgttcaacatacaagagatattcgatcatccttctcatgttggacattgccttaagctactcacaacgggagctcccgatcacaccgatcccaaatgccatctttgcggcgacagggctccttatgtctgcgtacaatgtgatttcatgaccttccatcaagagtgtactcatttacctcgtgttattcacgtcaatcaccatgaccaccgtgtttctttcaagtatcctcttggtcctggagaatggcgatgtggagtttgttgggaagagattgattggtcatatggagcatattcttgttccttttgtccaagttatgctattcattcaagatgtgcaacaaggaaagatgtgtgggatggcaaagagcttgatggggtacctgaagaagttgaagatgtcgagccattcaagaggaatgctgacaacacaatcaaacatttcgctcatcaacataacctcatgagcttcagcaaagacagtgaagaaagcaacttctgtggagcatgtgttcgtcccatcggttcttgcacgttctacaagtgttcagaatcagattgtagtttcattctccatgaaacgtgtgctaatcttcggaagaagaaacgacattttctgagcccacaacctctcactctcgacttcgtaacaaaacgaaaagaagaaaaatgtggagcttgtcatcaaatctgttgccaagggttcatctactctacatatcaaaatgagaattttgacttactatgcagttcgattactgtgccttttatccatggaggccatgatcatcatttactctatatcaaactagaatacggtcaagtgaagacttgcaagaactgtggcatcgatcatgcagaagtcgttctaggttgtatcaaatgcaattattttctggattttcgatgtgccactctaccattaacggtaagtctttctaggtatgatgatcatccactcactctttgttatggtgatgaaaaggcaagtggcagatattggtgtgatatttgcgaaagagaaacaaatccaaagatttggttctacacttgtaaagattgcggggtcacttcgcatatattttgcgtggttggggatatcaggtacgccaaaccaagaggaatgatcgaccgccattatagacttctgtctaacaatagctcttcacggccactttgcaacacgtgcaattgtcgttgcccaggtcccttcattcttcatgatccatataactatcatggattcataagtcgagatgatagcgacgtcctatatttttgttcttattattgtttcgtcctccttgccagacgacgccgcgggaacatgtgcccaccgtgggcattagaacctaatacttga

SEQ ID NO: 1348 - protein, 503 aa, Arabidopsis thaliana
MSLTLQGHEHRVSLIYHRDGIECDACDRSYGVGFSCSECKFTIHMKCIFVFNIQEIFDHPSHVGHCLKLLTTGAPDHTDPKCHLCGDRAPYVCVQCDFMTFHQECTHLPRVIHVNHHDHRVSFKYPLGPGEWRCGVCWEEIDWSYGAYSCSFCPSYAIHSRCATRKDVWDGKELDGVPEEVEDVEPFKRNADNTIKHFAHQHNLMSFSKDSEESNFCGACVRPIGSCTFYKCSESDCSFILHETCANLRKKKRHFLSPQPLTLDFVTKRKEEKCGACHQICCQGFIYSTYQNENFDLLCSSITVPFIHGGHDHHLLYIKLEYGQVKTCKNCGIDHAEVVLGCIKCNYFLDFRCATLPLTVSLSRYDDHPLTLCYGDEKASGRYWCDICERETNPKIWFYTCKDCGVTSHIFCVVGDIRYAKPRGMIDRHYRLLSNNSSSRPLCNTCNCRCPGPFILHDPYNYHGFISRDDSDVLYFCSYYCFVLLARRRRGNMCPPWALEPNT

SEQ ID NO: 1349 - DNA, 2034 bp, Arabidopsis thaliana
  CDS (1)..(2034)
atgactgagaatgtacgtggacacgagcatcttgtatccgtcgttaaccaaggtgatggtatggaatgcgatgcttgcgatcagttgcatgttggtggctactcatgcagcgaatgcaagtttaatattcacaagaaatgtgtatatgtgttcacggcaaaagagatattcgaccacccatctcatgatggacattgtcttaagcttctcacaaccggagctcctgatcacaccgatcccaaatgtcatctatgcggtaaaaacaccaaacgccttctttatcattgctctgattgcaaactcaatttggacattggttgcatagctgatcacagatctgccccattccatctgaatatgtcgtggcatcaccatcctctagtgcttggtctttcatattttgataggtgcagcttttgtcacaagattggcaacgaagacagcaagggctatcgctgccttcgttgcgggttggtgattcatacaagatgtaccttcatatttgactcaccagagatcactcaccctgcacatgttagacaccctcttaagcgtctcaccgatggagctccaaattacacagaccaaagatgtcatatatgtggagaaaacactgggaacttactttatcattgtgatatttgtaagttcaacttggatatgcgttgtgcgattgaaagacctccaccagtcgctctttcaaatctcaaggtccatgagcatacactcacactcatgccaagattgatctccttcgtttgtgatgcctgtggtacgaaaggtgatcgttctccttacatgtgtgttcaatgtgatttcatgaccttccatcaaaaatgtgctcgtttaccgcgtgtcattcatgtcaatcaccatgatcaccgtgtatccttcaagtatcctcttggtcctggagaatggagatgtggagtttgttgggaagagattgattggtcatatggggcttattcatgttctctttgtcctaattatgctattcattcattgtgcgccacaaggaaagatgtgtgggatggaatagaactcgatggagtacctgaagaaattgaagacatcgagccattcaagaggaatgatgacagcacaattactcactgcgctcatcaacataacctcatgagcctcaggaaagacggtgaagaaaacagcttgtgtggagcatgtgttcgtcccatcggttcttacacattttacaaatgttcagaatcagaatgcattttcattctccatgaaatgtgtgctaatttacgtaagaagaaacgacattttctgagcccagaacctctccatctttctgtattggaacagtctgatgactcgccaacagcttgttctgcatgtcttcaagtttgttctgaaggattcgtctatgaccatgatacatatgggacttttgacttgctatgcagttccattgatgtgccttttatccatggaagtcatcctcatcctttactctaccttaaactacaacacggtcactttaagacttgtcagagctgcggcatcgatcatactaaagtcgtcataggttgcctcaagtgcaattattttttggattttcgttgcgccactctaccattaacggttagccttcctaggtatgatgatcatccactcactctctgttacggtgaaaaatcgagcgacaaatattggtgtgatatttgtgaaagagaaacgaatacagagacttggttctacactggttcagaaagcggggtcactttgcatattttatgtgtacttggagatatcaggtatgccaaaccaggaggaaatatctgtgaggggggttttgtgctacctaacaatagttctacacgaccaatttgctacaattgtcattgtcgttgcccaggtaccttcattgttttaggttgggtcgactatgaccccgagttcttctgttctttttactgtttcaaatctcacctaaagttccattttgacgaatatcataccgtctgccctccatgggcgttagagttagaatcgaatacgagctggtag

SEQ ID NO: 1350 - protein, 677 aa, Arabidopsis thaliana
MTENVRGHEHLVSVVNQGDGMECDACDQLHVGGYSCSECKFNIHKKCVYVFTAKEIFDHPSHDGHCLKLLTTGAPDHTDPKCHLCGKNTKRLLYHCSDCKLNLDIGCIADHRSAPFHLNMSWHHHPLVLGLSYFDRCSFCHKIGNEDSKGYRCLRCGLVIHTRCTFIFDSPEITHPAHVRHPLKRLTDGAPNYTDQRCHICGENTGNLLYHCDICKFNLDMRCAIERPPPVALSNLKVHEHTLTLMPRLISFVCDACGTKGDRSPYMCVQCDFMTFHQKCARLPRVIHVNHHDHRVSFKYPLGPGEWRCGVCWEEIDWSYGAYSCSLCPNYAIHSLCATRKDVWDGIELDGVPEEIEDIEPFKRNDDSTITHCAHQHNLMSLRKDGEENSLCGACVRPIGSYTFYKCSESECIFILHEMCANLRKKKRHFLSPEPLHLSVLEQSDDSPTACSACLQVCSEGFVYDHDTYGTFDLLCSSIDVPFIHGSHPHPLLYLKLQHGHFKTCQSCGIDHTKVVIGCLKCNYFLDFRCATLPLTVSLPRYDDHPLTLCYGEKSSDKYWCDICERETNTETWFYTGSESGVTLHILCVLGDIRYAKPGGNICEGGFVLPNNSSTRPICYNCHCRCPGTFIVLGWVDYDPEFFCSFYCFKSHLKFHFDEYHTVCPPWALELESNTSW

SEQ ID NO: 1351 - DNA, 2334 bp, Arabidopsis thaliana
  CDS (1)..(2334)
atgatgaatccagaatccgatcatccttcatctcctcgtcaacgtaagattggaatcgccgtggagctctctgaagaaagtgccttcactgttcgttgggctgttgataactacatccgtcagggagacgacatcattattctacacgtctctccaaccgccggtctctttggagccgattggggatattaccctctccaaactcaacctccttacaccaccgcttctattttctccaaagtagcggatctcgggaagccattgaaggaagctggattccctcacacgattcatacagtcaaagattacgataagagagagaggctttgtcttgagactcaacggctcaatctcactgctctgattatgggatttggtgatggctctgttagtgatttctgtgttcaccactgtgtttgtcaagtcgttgtggttagataccctgatggtcctggcagtgttgaaggtactcgggcagcgcctattgtaactttcaaatcacgtacggatgatgacgaagagatagataaggctaagactgctctgactgcttctgttcatcatcaacacatcaaagccatggattcggtgtcaaagcagcctcttctcttttgccctcgtgcatattttactaacaatgaagaagattttcgcgcgatgcaattccgagagccaccaaatctttcatctccatcttttcacctcacctccttagttttgggcaacgactttaacataacacgcaaatactactacgacagacatggcaagggcttcattaaaggccatagacctaacaaacaatgtgaaatatgctccaagtcattactcggctactaccacgaagcctgtatcgagccgatatcaaagcacccatatcatcctaaacatgctctccgatttcgttatgaatcaggtcagatatgcttatcttgttcaacttttaaggattttgcttaccattgctctatatgcaattttaccatgtgtcaagattgtgctagagagccaccactctttgcaatagactatccaaaaaggcatgagcatacactcttctactttcaaaggaaaggctccttgatttgtgacgtttgtgggttgagtgatggcaggtctttgctgtattcctgtgtcaagtgtaattttgtagtccataaagagtgtgtctattttccatgcatcataaaaatatcacgtcatgaacatcgtctctccttcaattcttcacttactcctgaacaatggttatgtggagtgtgtcgtgaaagcatagacacaaattttgcaagatattcttgcgtaaagggttgcagtttcgcggttcattctaaatgtgcaacgcgaaaagatgtatgggacggaaaagaacttgagggagaaccagaagaagatgaatctctatatatttttaagtcgttcaatgagataagtgatggaattatagaatattttcgtcacaaaagtcatcatatgagactggacgaggataccaacagagcatttgacgaggataaacgttgtcgagcatgcacgtttcctatctgtgatgatcttatttacagttgcatgcaatgtgattttatcctccatcaaacatgtgcacatcttcctccgaggaaacaacatgcgacacatcctcatccccttcttctactggtggatgaggaacatgaagattattttcaatgcactgcttgtaagcgtgaaagcaatggttttgcgtacacatgttgtgctagggattgcaacttcacattagacgtatcttgcgcttctatagctgagtcattgattcatcggtttcatccgcatcctatttatttaatacatgaatccacagcgcaagagttctgttcgatttgcggacaactcataggtcatcgtctaaactgtggagaatgtcgttttgctttgtgttttgggtgcgccactttacccaataagttgaggtataagcatgatgaacattttctcatattttcttatgatgaagacttcagtggttcacaagaaagtggtccgcatttgtgtgaagtttgtgaaaaacaagcaaatccgaagaatggagtttatatgtgcaatgattgtaacgtcacactgcatgttgaatgtcttcttggaaaggagatgtatatgatgcctattggagggctcatttcccgtaacgtaaatgttgatattcttcccaataatcgtctcactcgcaacatatgccaacgttgccataatcgttgtcaaggaaaaataatcttcaaagcacgtgacagatcaacatttttatgttctttgttttgttgtctgacgaagagttgggtggacagagacacatag

SEQ ID NO: 1352 - protein, 777 aa, Arabidopsis thaliana
MMNPESDHPSSPRQRKIGIAVELSEESAFTVRWAVDNYIRQGDDIIILHVSPTAGLFGADWGYYPLQTQPPYTTASIFSKVADLGKPLKEAGFPHTIHTVKDYDKRERLCLETQRLNLTALIMGFGDGSVSDFCVHHCVCQVVVVRYPDGPGSVEGTRAAPIVTFKSRTDDDEEIDKAKTALTASVHHQHIKAMDSVSKQPLLFCPRAYFTNNEEDFRAMQFREPPNLSSPSFHLTSLVLGNDFNITRKYYYDRHGKGFIKGHRPNKQCEICSKSLLGYYHEACIEPISKHPYHPKHALRFRYESGQICLSCSTFKDFAYHCSICNFTMCQDCAREPPLFAIDYPKRHEHTLFYFQRKGSLICDVCGLSDGRSLLYSCVKCNFVVHKECVYFPCIIKISRHEHRLSFNSSLTPEQWLCGVCRESIDTNFARYSCVKGCSFAVHSKCATRKDVWDGKELEGEPEEDESLYIFKSFNEISDGIIEYFRHKSHHMRLDEDTNRAFDEDKRCRACTFPICDDLIYSCMQCDFILHQTCAHLPPRKQHATHPHPLLLLVDEEHEDYFQCTACKRESNGFAYTCCARDCNFTLDVSCASIAESLIHRFHPHPIYLIHESTAQEFCSICGQLIGHRLNCGECRFALCFGCATLPNKLRYKHDEHFLIFSYDEDFSGSQESGPHLCEVCEKQANPKNGVYMCNDCNVTLHVECLLGKEMYMMPIGGLISRNVNVDILPNNRLTRNICQRCHNRCQGKIIFKARDRSTFLCSLFCCLTKSWVDRDT

SEQ ID NO: 1353 - DNA, 3069 bp, Arabidopsis thaliana
  CDS (1)..(3069)
atggattccgagtcggagctcatgatatctcttatttctcaaatgttaaccatctcattctccggggatgactcaccacagatgcattcaaagtacataagacttgcttgtcaactaatctctttggtcaactctctggatttggattcgcagtcagagcctaagtcgaagatcatatcgctcataaagcaaataatctctgtcagcaactctgtttcaggaccaggaccagagtgcgagttggtatcactggtgactaaaatgatctctatcatcagctctacatattttgatctcaagcagtcagagccggagcttatatcacttaccgctcaaatattctctatcctcctagcaatggaccagcgctcggagctcttaacactcctttctcagctaggccgtctcgtccagacggaggaactgaagatcaccaataaccaacaagtacctctcaccgaagaaacagatgttttcgacggctacacagaggttacgaattgggagtcggagctcattttatatatcatttctcaaatggtatctttaataagaggtgaggatatgtgtctagagctggcaacagatctcacaggatacgttactcaacttatccctctcatcaaatctttaaatctggattcgaatccggagtcggagcaagagccgaagatcacatcactcattaggcaaataatctctctcagaaacacgtatgtttctggaccagagtcgcagttggtatcactcgtgactcggattatatctatcatcagctctacagacttggatcccacggaatcacaatggaggctcacgtcagtcacttataaaacatgccgtatcctcaacgaaatgaaggattcgaattcggagatggcatcactcattaatcaaatacacgatctcgttgatgcagatgagagacgaaagccagagtcgaggctcatatcacgcatcactcaactaatgtctctcacaaactcttggagttatacttcagatagggattccaagatcatatctctcattattcgaataatcgatctggtcaaatcgatggatttggattcgaagacgaagccgaagtcgaagctaatgtcactcattactcaaacaatctctgtttacaactctatggatttggattctcagccgaagccgctaaggaagctcatatcacttgtttctcactgtcttcataacgttaggcctacagattcggactcagactcagatgggaattacgtgtcacacgttgaagattcattgaatcacgagccggagctggagctcatttcactcatccatcagataggctccctcgtcatttctatgaatccaaaatggaagaagcttatttccttctgccctatatttgaagtaagtttgaatcatggtaaatttcaagtgagccaggaactcacctgcagaagcaatcggttatactatatccctatgaagtgggattgtctccaggtcaactggaatttactaaagttaccaggagaaaatgacttcactcattttcgatgtcgaggttgcaatggtgagaaccataaaggttatgaacaggctccggttgatgtcaaacaccctcttcatccaaaacattctcttcagcttgtttcgtcgcaaccttctagtgttagaacgagggaatgttattgctgtgatgaagatcttgcccatatattctattgttgtttggcttgcaattatgctatgaatgtagcttgtgtgaagaaacctagtgtcttatatagagactatacgaggtggcatgagcataaacttgctctgtttccaagactgcaggcttccagcttaacttgcaacctatgtgccttggctgattctagctcgcctatctatatgtgtcccccttgcgactttgtcgtccatcaaaggtgtaccggcttaccacgtgttataaggatttcccgccatctccaccgtatatcatttacctactcctttgaccaaggagatttgtgttgtagtgtttgtcgcagaaagatagacaatgattacgggggctattcttgcatcaaggacggttgttcatatgcggctcattcaagatgtgcaacacaaagaaatgtgtgggatggcatcgaacttgagggaaagccagaagaagttgaagaagaagtcgttgaaccgtttgtgacaataagccatggaatcatacaacattttagtcacccacaacatcatttgaaacttgacgagaacacgagcaaagattacgacgaggataagttatgtcaagcatgcatcatgccaatctacttcggtaacttctactcttgtgtgcaatgtgattatatactccacgacgaatgtgcgagtttccctcgcaaaatgcatcatccgatacatccacatctgctcactttagtgaactctgatggtgttatcaacgttagaaagaaatgttcagcttgtccttggatgtgcacaactggtttcttctatgagtgcagtaaagaagatttccagctacatgtgcagtgtgccaacgtttctgagccactagtccatgaaagtcatatgcatcctttattcctaacaaccaaaccagaagagtggagagtatgttccgcttgcaaagagtcagattgtactgtgacaaatgaaacattcaactccatagagtgtgattttgctttgtgctttagatgtgctactttacctcaaaagttgaggtataagcatgacaagcatacgctcactctttcgtatggcgaggagacaagtaccatgccatcttggtgtgaaatttgcgagagaaatataaatccacaggagcgattttatatgtgtgatgagtactgttgtgtcaccctacatattgaatgtatgcttggggtggctttatacatcaagcctggttcatcgtggatcagcttcaacaataaaaagatgtatgctctggccaacaatcatcatatgtctcgacctctttgcttcatttgcaaggagcgttgtccccacaaaatagttttcaagtacgatgaagttatattttgttcccaaaagtgcagggggaaatataggtactag

SEQ ID NO: 1354 - protein, 1022 aa, Arabidopsis thaliana
MDSESELMISLISQMLTISFSGDDSPQMHSKYIRLACQLISLVNSLDLDSQSEPKSKIISLIKQIISVSNSVSGPGPECELVSLVTKMISIISSTYFDLKQSEPELISLTAQIFSILLAMDQRSELLTLLSQLGRLVQTEELKITNNQQVPLTEETDVFDGYTEVTNWESELILYIISQMVSLIRGEDMCLELATDLTGYVTQLIPLIKSLNLDSNPESEQEPKITSLIRQIISLRNTYVSGPESQLVSLVTRIISIISSTDLDPTESQWRLTSVTYKTCRILNEMKDSNSEMASLINQIHDLVDADERRKPESRLISRITQLMSLTNSWSYTSDRDSKIISLIIRIIDLVKSMDLDSKTKPKSKLMSLITQTISVYNSMDLDSQPKPLRKLISLVSHCLHNVRPTDSDSDSDGNYVSHVEDSLNHEPELELISLIHQIGSLVISMNPKWKKLISFCPIFEVSLNHGKFQVSQELTCRSNRLYYIPMKWDCLQVNWNLLKLPGENDFTHFRCRGCNGENHKGYEQAPVDVKHPLHPKHSLQLVSSQPSSVRTRECYCCDEDLAHIFYCCLACNYAMNVACVKKPSVLYRDYTRWHEHKLALFPRLQASSLTCNLCALADSSSPIYMCPPCDFVVHQRCTGLPRVIRISRHLHRISFTYSFDQGDLCCSVCRRKIDNDYGGYSCIKDGCSYAAHSRCATQRNVWDGIELEGKPEEVEEEVVEPFVTISHGIIQHFSHPQHHLKLDENTSKDYDEDKLCQACIMPIYFGNFYSCVQCDYILHDECASFPRKMHHPIHPHLLTLVNSDGVINVRKKCSACPWMCTTGFFYECSKEDFQLHVQCANVSEPLVHESHMHPLFLTTKPEEWRVCSACKESDCTVTNETFNSIECDFALCFRCATLPQKLRYKHDKHTLTLSYGEETSTMPSWCEICERNINPQERFYMCDEYCCVTLHIECMLGVALYIKPGSSWISFNNKKMYALANNHHMSRPLCFICKERCPHKIVFKYDEVIFCSQKCRGKYRY

SEQ ID NO: 1355 - DNA, 2055 bp, Arabidopsis thaliana
  CDS (1)..(2055)
atggattcggagcagcagacggagctcttattacgcattagtcaactagtgtctttcgtcgatcctctcttttggatttcggatgaagcaacgagttatgtcgtattagtcactagtcgcataatcgatctcctcagctctatggatttggactcgctaccaaaaccggagaccaaactcatgtcactcactactcaaaccatagctctcttcaacactatggatttgaaatcccagccgaagccgctaaggaagttcatatcattagtatctgaaaacatccctctcgtcaactctatagattctgctacggatcagaagctcaagttgctcttttttaaaataagggaactcgagccggagccggagctcatatcactcctccaccaaatttactacctcgtcaaatctaaggatccagagtgggagaagcttatttccttatgcccacaagtacaagtaagctttcacgacggaaaatttcaggtgactggaaatgtccagcggtgcagcaataaaaagcgggactgccgatttgaacgctacaagttttcaggagaagactacacccattttcgctgctcggcttgcaatggcgacgaccatgatgaagaatatgacaaggctccacttgagatcattcaccctcttcatccaaaacattctctccagcttgtcttgattgaagcttcttatagaacgagggaatgttattgctgtgatgaagatctcgaacagatgttttattactgcccggcttgtgattatgctatcaatatagcttgtgtggagaaaccacgacgcttatctgtagaccatcccaagtggcatgagcatactctttctctgtttccaagaaagactcccttgacttgcagcgtttgtgcattgacacatacaagatgtcctttctatatatgtcccccttgtgactttgtggcccatcaaagctgtttcagcttaccacgtgtcattcgcatatctcgtcatcaccatcgtatctctttcactcattcttttgagaaaggagattggtcttgcggtgtctgccgtaaaaagatcgacaatgattatggcggttattcttgcatcaaggacggttgtttctatggggcacattcaagatgtgccacacgaagaagtgtgtgggatggtaaagaactcgagggagagccagaagaaaatgaagaagaacttaagccgtttgtcaggataagcgacggaatcatacaacatttcagtcataagcatcatcatttgagacttgatgagaacactgacagagattacgatgagaatatggagtgtcaagcatgcgtcagaccaatctatttcggtaacttctactcttgtatgcaatgtgatttcattcttcatgaagcatgtgcgaatcttcctcgtagacaccatcatccaatacatgcacatttgctaactctagtaacagagtattacaatgttatggtccatcgtagccaagtttgttcagcttgtccttcgttgttgagggcttgtttcttctataagtgcgatgaacaagactgtgatttccagctacacgttcagtgcgccgtagtttctgagccgctagtccatgaaagtcatatgcatcctttattccttacatccgaaccatatgaggcaagactttgttcggtatgcaaaaaagaatcatggcttcttctttccacaaaagaaacattcaattgcattgaagagtgtgattttgctttgtgttttggatgtgctactttacctcaaaagttgaggtataagcatgataagcatatgctcactctttcttatgggaacaagacaagtaccatggcttattggtgtgaagtttgcgagggatacttaaatccaaaagagcgattttatacgtgtgaggaggattgttgtgtcaccctccacattgaatgtatatttgctatgaccatgaaaccttattcgtggtggctcttctccggtaaaaaggtatacgttctaccaaacaatggtcatatgactcacacatttgcttcgtttgtgagaagcgttgtccacacaaagtag

SEQ ID NO: 1356 - protein, 684 aa, Arabidopsis thaliana
MDSEQQTELLLRISQLVSFVDPLFWISDEATSYVVLVTSRIIDLLSSMDLDSLPKPETKLMSLTTQTIALFNTMDLKSQPKPLRKFISLVSENIPLVNSIDSATDQKLKLLFFKIRELEPEPELISLLHQIYYLVKSKDPEWEKLISLCPQVQVSFHDGKFQVTGNVQRCSNKKRDCRFERYKFSGEDYTHFRCSACNGDDHDEEYDKAPLEIIHPLHPKHSLQLVLIEASYRTRECYCCDEDLEQMFYYCPACDYAINIACVEKPRRLSVDHPKWHEHTLSLFPRKTPLTCSVCALTHTRCPFYICPPCDFVAHQSCFSLPRVIRISRHHHRISFTHSFEKGDWSCGVCRKKIDNDYGGYSCIKDGCFYGAHSRCATRRSVWDGKELEGEPEENEEELKPFVRISDGIIQHFSHKHHHLRLDENTDRDYDENMECQACVRPIYFGNFYSCMQCDFILHEACANLPRRHHHPIHAHLLTLVTEYYNVMVHRSQVCSACPSLLRACFFYKCDEQDCDFQLHVQCAVVSEPLVHESHMHPLFLTSEPYEARLCSVCKKESWLLLSTKETFNCIEECDFALCFGCATLPQKLRYKHDKHMLTLSYGNKTSTMAYWCEVCEGYLNPKERFYTCEEDCCVTLHIECIFAMTMKPYSWWLFSGKKVYVLPNNGHMTHTFASFVRSVVHTK

SEQ ID NO: 1357 - DNA, 1902 bp, Arabidopsis thaliana
  CDS (1)..(1902)
atggctatattatcgataaaactacctattcacatacatcctttgtccctttcctttcgatttcatgatcggtgtgaaggctgcagttttcgaaaccaaggtgaatactatggaggctatcgatgtaatgattctgactgcaatcgtgttctgtttcacaaggaatgcgccgagtcaccacttgaaatcaaccacccttctcacccggaacatcctctccggcttacagagaggcctccaagatatgaatgtgatatatgcggcattcatcacttagctgatgtgccgtatttttatcattgttccatatgtgacttcaacgtcgacacatcatgtgcgcggaaaccaccaccgccacctactcatgattttcaagacctaccatttgtctttccaaagataagtggaatatacaattgttgtggagtatgtgggcactcagttgttgctggtaaatattattattcactaccttctcgggatcagtatgctcatttggagtgtatatatcatgagaaaaaagtaaaccttccttttcaccctaatcaccctcttgagctcaccatatctaaatccctccctgatgatgccgaaaaagcatgtgttttgtgtggagtgagatcggaaattgtgatgtattactgcttaatatgtgacttcagcatgtgcctaaactgtgtgagaagccctccacctcttacggccaagtctcttatttatgtcttcaatgtgatgttatggtccatcgaagttgtattggcttaccgcattgaatcagtttcatggggcttcatttgccccaaatatgttgttcattcgcaatgtgcaacaagttacaacgtttgggatgggatagaacttgaagggataccagaagaagctgaagatcttccgtttaaggtggttggtgataacctgataaatcatttcagccacgagaaacataatctaaggcttaccaatgaagacattatttatgatgaaagtagccgatgtgaagcatgcatctttcctcgcaactctggttcgatatattgttgcgatcaatgtacttttttccttcatgaaaaatgtgcacatctgcctatgaagagacgccacttaatatacaacagaccatttaccctacatgctagaggaaaagatctccaaatagattggttctcatgtgacgcttgtggaaaacaatcgactggtttcaggtacatctctgatgatttaatgcttgatgtacattgcagttccgtttccgaaccgttcgtccatgatggccatgtacatcccttatattacaaagaagaagccagtaccaagtgtgattcatgtcataagctgtcttataacatgcttggttgtgatgtttgtgactttagtttggatttttgttgtgcaaatttgccaaagacacttaagcacaaatacgatagacatcctctctccctatgttatggtgaaaaggcaagtggtaaatattgttgtgatatttgcgagacggaaatggatccaagtaagtggttctacacatgcgatgattgtgtggtcacattccatattgactgtgtttttggggatttctcacgcttcatcgcaggatccatattcgagactataatatacacatttgaagtggttcctaccaaagatactacacgacagctatgctcccagtgtcactctcgatgcaaaacacctttcattctaaaggctcttagccaaactgaagattattgtatttgttctttcaatgggggtagtggtggttgtgttgtgagattaaatttgacttgtggctgtggtgtcgaggatggtggtggaggttatattgatgatggtagagggaatattgatttggttggagtgaggggtggtggtggatgttgtgttgatgatggtgagaaataa

SEQ ID NO: 1358 - protein, 633 aa, Arabidopsis thaliana
MAILSIKLPIHIHPLSLSFRFHDRCEGCSFRNQGEYYGGYRCNDSDCNRVLFHKECAESPLEINHPSHPEHPLRLTERPPRYECDICGIHHLADVPYFYHCSICDFNVDTSCARKPPPPPTHDFQDLPFVFPKISGIYNCCGVCGHSVVAGKYYYSLPSRDQYAHLECIYHEKKVNLPFHPNHPLELTISKSLPDDAEKACVLCGVRSEIVMYYCLICDFSMCLNCVRSPPPLTAKSLIYVFNVMLWSIEVVLAYRIESVSWGFICPKYVVHSQCATSYNVWDGIELEGIPEEAEDLPFKVVGDNLINHFSHEKHNLRLTNEDIIYDESSRCEACIFPRNSGSIYCCDQCTFFLHEKCAHLPMKRRHLIYNRPFTLHARGKDLQIDWFSCDACGKQSTGFRYISDDLMLDVHCSSVSEPFVHDGHVHPLYYKEEASTKCDSCHKLSYNMLGCDVCDFSLDFCCANLPKTLKHKYDRHPLSLCYGEKASGKYCCDICETEMDPSKWFYTCDDCVVTFHIDCVFGDFSRFIAGSIFETIIYTFEVVPTKDTTRQLCSQCHSRCKTPFILKALSQTEDYCICSFNGGSGGCVVRLNLTCGCGVEDGGGGYIDDGRGNIDLVGVRGGGGCCVDDGEK

SEQ ID NO: 1359 - DNA, 2031 bp, Arabidopsis thaliana
  CDS (1)..(2031)
atggatgaaaacctatattttgtatacaaattaacacaaacagattatccaacctcttctggtgaagtactagccatggattccactggcgacgaccaacctcttgatcaacctctttttctatgtcctgatgcacgtatcaaatttcacaagctcaaaatacagagagaggatggtgatatttttgattatgatttcaagtttcatccatacatttcttcccctcacttccccagcaaaagaagcggtgatcaacaaggtgaatctttgcttgattgcgacgaagatggtatctgtaaactccctgtagtccctctcttttggtgcaacaataaagaaagtgattctcgcgaattccagtgcggtggatgcagagattcaatgctcagcgctagctattatgcatgtcttcaatgtgaaaaaaaattccacaaagaatgtgtagagtctcctcttgaaatcaaacacccaacccacctttttcattctcttcgactttactatcatccagcgcctgagttttgcatttgttgtaaaacagaagtcttcatgattttctatcattgtcttacctgcaatttgagtatgcatccagtctgtgcaatgaggaaagtacccttttttattgaccatccaaaaagccatccccaccctctcacttttttccctacacaagcttcgttagtttgccatttttgcgctttgattaagaagcttgatcccacatacatttgtaccaaatgtgtcttcgtaatccataaaggctgtatcggtttcccacatgtcataagaatatcccgtcacacccaccgtatctcttttacttcttctcttccatgtggaaagctttcttgtggagtatgtcatcagcaagtggacaacgattatggtgcatattcttgcaagaaatgtgatgcttattttgttcattcaaaatgtgcattacagagacatgtgtgggatggaaaagatctcgaagaagtgccagaagaagatgatatgatagatgatggtgagccgttcaagaggatagctgatggaataatactacatccttttcatagtcacaatctgcatcttcagacaactagagcttatgacgaaaatacgtattgtcgagggtgtgcccttccaatctacgaaggtcagttctattcatgcattgaaagcgacttcatcctccatgaacattgtgcaaatgctccacgcatgaagcgacatcccttacatccacatccacttacactagttgttgccaccaggggacctggtaatgaggaaggtacatttcaatgtgacgcatgtcatcgtaaaggtactggcttcttctatgagcatcatactgatcaagaaaacatcttcatgctagacatacattgtgcctctattttcgaaccctttcaatatcaaggccatgaacatccattattcctaccttcagaaccaaataaatggggaagatgtcagatgtgcacatacgaatacgttaatttaaatttaaattgcttggaatgcgattatattttatgtttccattgtgctaccttgccatacaaggtaaggtataagcatgacagtcattttctcaagatttgtaatgggaaggaggcaaatgatcaatcatactggtgtgagatttgtgaaggcaagatagaggaaggaacggaaagagcgttttacaatactccaaagaaggacacgtcattttacaaatgcaatgcctgctgcaccactcttcatcaacggtgcttacttgggatagatacttacatgaaacctggagaaactgtaaaagactacctttcttcaatcaagtatgcatctgaaggtcaaagcaaggaatcaatcacagatgttcagattcttctgaacagttctcccacccgaccaatttgcactcgatgtctttgtcgttgtccatttccaattttttttaaagggcataacacaatattttgttcttgggattgtgttgaagattcggccatgcgatcctaccaacgacttctctattcgtttctatggggttaa

SEQ ID NO: 1360 - protein, 676 aa, Arabidopsis thaliana
MDENLYFVYKLTQTDYPTSSGEVLAMDSTGDDQPLDQPLFLCPDARIKFHKLKIQREDGDIFDYDFKFHPYISSPHFPSKRSGDQQGESLLDCDEDGICKLPVVPLFWCNNKESDSREFQCGGCRDSMLSASYYACLQCEKKFHKECVESPLEIKHPTHLFHSLRLYYHPAPEFCICCKTEVFMIFYHCLTCNLSMHPVCAMRKVPFFIDHPKSHPHPLTFFPTQASLVCHFCALIKKLDPTYICTKCVFVIHKGCIGFPHVIRISRHTHRISFTSSLPCGKLSCGVCHQQVDNDYGAYSCKKCDAYFVHSKCALQRHVWDGKDLEEVPEEDDMIDDGEPFKRIADGIILHPFHSHNLHLQTTRAYDENTYCRGCALPIYEGQFYSCIESDFILHEHCANAPRMKRHPLHPHPLTLVVATRGPGNEEGTFQCDACHRKGTGFFYEHHTDQENIFMLDIHCASIFEPFQYQGHEHPLFLPSEPNKWGRCQMCTYEYVNLNLNCLECDYILCFHCATLPYKVRYKHDSHFLKICNGKEANDQSYWCEICEGKIEEGTERAFYNTPKKDTSFYKCNACCTTLHQRCLLGIDTYMKPGETVKDYLSSIKYASEGQSKESITDVQILLNSSPTRPICTRCLCRCPFPIFFKGHNTIFCSWDCVEDSAMRSYQRLLYSFLWG

SEQ ID NO: 1361 - DNA, 1350 bp, Arabidopsis thaliana
  CDS (1)..(1350)
atggatctagactgtatggtgaatctaccaccactcactattttcgagccaaagcaccataagcatagcttcaacctcttgttacgagtagtcacctttacttgtaatgcatgtggattggaaggtgaccgtaatccttatgtatgttatgaatgccatctcatggtacacaaagattgtattgaaggtctaccgggagtcatatacatcaatcggcatgatcatcgtgtctctcacacttttcatcttggtcaagaagagagagattgggagtgtggagtttgtcgtaggacgattgattgggtctacggagcatatacatgttctctttgtcctagttatgctgttcattcaaaatgtgcaacgaggaaagaagtgtgggatggtagagaactcgaagatgtgtccgaagaagatgaagaaattgaagatccattcaaagtaattaatgaaacggatatcatacattttagtcatgaagaacatgtacttagattggatgagaattgtcatatggaaaatgacgctacgcgttgccgggggtgcattcttgctattaatggcaatctatcctacaaatgtctggaatgcgatttcatcattcacaaagtatgtgcaagtcttccgcggaagagacgacattttttgcacaaccataaactcactctacgagttgacaaggcttctatatttttatgttctacttgtgataccactcctaatggtttcagatacgagtgtgacgaagaccatggcgatgaagaatttgtctttgatcttcagtgtagttccatatcagaaccctttctacacgatttgcatccacacccgttatactggaccttggaacattccaaaaagtgtaaggcttgtggcaccaaagcaggttatgatctcaactgtatagtgtgtgatgattactcattatgcatgacgtgcgctactttaccaagtaaagtaaaacataggtgtgacgatcatcttctgtcactacgtcaaggtgcttctgacttcgatactggtcacttgtggtgtgatatttgtgagaccaagacagatccgagtgtattttactatacttgtgatgattgtggggtcagccttcatttaaagtgtgtacttggagatttatataatgcgaagctaggactaatagatcccagagatcccgctcatgaagtacttcccaataatggtgttactcgacctttctgcttccattgtgaacttcgttgtaagttccccttccttataaggagagctacagaagaatttactctttactattgttcgctaaattgttgtttagaagcagccttctatattccacctgtaacagatgaagggtag

SEQ ID NO: 1362 - protein, 449 aa, Arabidopsis thaliana
MDLDCMVNLPPLTIFEPKHHKHSFNLLLRVVTFTCNACGLEGDRNPYVCYECHLMVHKDCIEGLPGVIYINRHDHRVSHTFHLGQEERDWECGVCRRTIDWVYGAYTCSLCPSYAVHSKCATRKEVWDGRELEDVSEEDEEIEDPFKVINETDIIHFSHEEHVLRLDENCHMENDATRCRGCILAINGNLSYKCLECDFIIHKVCASLPRKRRHFLHNHKLTLRVDKASIFLCSTCDTTPNGFRYECDEDHGDEEFVFDLQCSSISEPFLHDLHPHPLYWTLEHSKKCKACGTKAGYDLNCIVCDDYSLCMTCATLPSKVKHRCDDHLLSLRQGASDFDTGHLWCDICETKTDPSVFYYTCDDCGVSLHLKCVLGDLYNAKLGLIDPRDPAHEVLPNNGVTRPFCFHCELRCKFPFLIRRATEEFTLYYCSLNCCLEAAFYIPPVTDEG

SEQ ID NO: 1363 - DNA, 2010 bp, Arabidopsis thaliana
  CDS (1)..(2010)
atggagagatcagtagatttaccgattcacaagcatccattataccattcatcaaggtttataaatggtcgttgccgcggttgcaagcaaacctcacctatctatagtggctaccgttgcaatgactctgattgtaaccatgtttggtatcacaaagaatgtggcgaatcattaccggagatcaatcatccttcccatctcgagcatccgctctgcttaatcgactacaggggaagtggtacgtgtgctttttgtggagctttcttgtttggtcctacgtatcattgttggatatgcgcctttaatatcgatatagcttgtgcgagaaaacaactacctccacttgctgctattgaaaatcccaaatgtcataaccattcacttgttcttttggagaagcaagtgaagaaagatcattgtggagtttgcaagaaaacagtttttggtatgtatccttacgtttgtcttgagtgtgatgtgtatttccacgtcgaatgcataaatatatcgcgggaggtccaccattcttctcatactaatcacactctcgagcttttcggatctgagtcgctacctgatagcgctcaaaagacttgtcttttgtgtgatgacgtatcagatcacttgatttatcattgttccgtttgcaacttcagcatctgtgtttattgtgcgataaatcctccaccgcttgctatagaacatcttaagactcacgagcatacgctaactctcttgcctagacaagttaagtttatttgcaatgcttgtggaatgaaaggtgatggatgtccttacttttgtcttggatgtggttacttaatccatcggaaatgcatcgatttacctcgcgtcattaacatcaatcgtcatgatcatcgcatctctctcacgcatcatcttggtcttcagtattcagaatgtggagtatgtcgtcaaagtgttaatggatactacggaggttattcttgctctctttgtcccaactatgttgttcatccacaatgtgcaatgaaagatgatgtatgggacggaatagaactcgaagggactcctgaagatagtgagcaagataccgcgccattcgaggtggttgatgacaacacgataaaacatttcagccatgaaaaacataatttgatgctcaacaagaatggtatcatcactcaacatgatgaaatcacacgttgccaagcatgtgtccttcctctatcgtcagatcctagctacagttgtggtcaatgtgattatgttcttcatgaaacatgtgcaaatctccctcgaaagaaaaggcatgtgttcaacaacaaaccatttacgttacacacaggaggtaaagattcttctaggaattggtttgagtgtgatgcttgtagaacaatctccaatggttttagatacgtttctggtgattggattctagatgtgcattgcggttcgatgtcagaaccattgctccatgatggtcattcacatccgttatattactacagaaggcaaggcaagtcatgtcgttcgtgtcacaacaaagtggtgaaacctagagtactatgttgtgatacttgtgactttgatttggatttctactgtgctaatttacctaaaacggtaaaacattgctacgacgagcatcctctttctctatgccacggcgaagatgatgtgattaaggataacaaatattggtgtgacatatgcgaaacagaaaccgatccaaagaaatggttctacacttgttatgactgcggggtaactttacatgtcaagtgtgtactgggagacttctcgcgtctcatgccagggcggaacattaatgtcgatggacgtgagtatgaagttgttcctaacagcaagagttctcgaccattctgcgaccaatgccattctcgatgtaaagatcgcttcattctaaaggcttggaataattgcaatgttgttaattgtaatctatgcgttgatgtctacatttgctcccgtaaatgccgccagccctttcatttgagacattag

SEQ ID NO: 1364 - protein, 669 aa, Arabidopsis thaliana
MERSVDLPIHKHPLYHSSRFINGRCRGCKQTSPIYSGYRCNDSDCNHVWYHKECGESLPEINHPSHLEHPLCLIDYRGSGTCAFCGAFLFGPTYHCWICAFNIDIACARKQLPPLAAIENPKCHNHSLVLLEKQVKKDHCGVCKKTVFGMYPYVCLECDVYFHVECINISREVHHSSHTNHTLELFGSESLPDSAQKTCLLCDDVSDHLIYHCSVCNFSICVYCAINPPPLAIEHLKTHEHTLTLLPRQVKFICNACGMKGDGCPYFCLGCGYLIHRKCIDLPRVININRHDHRISLTHHLGLQYSECGVCRQSVNGYYGGYSCSLCPNYVVHPQCAMKDDVWDGIELEGTPEDSEQDTAPFEVVDDNTIKHFSHEKHNLMLNKNGIITQHDEITRCQACVLPLSSDPSYSCGQCDYVLHETCANLPRKKRHVFNNKPFTLHTGGKDSSRNWFECDACRTISNGFRYVSGDWILDVHCGSMSEPLLHDGHSHPLYYYRRQGKSCRSCHNKVVKPRVLCCDTCDFDLDFYCANLPKTVKHCYDEHPLSLCHGEDDVIKDNKYWCDICETETDPKKWFYTCYDCGVTLHVKCVLGDFSRLMPGRNINVDGREYEVVPNSKSSRPFCDQCHSRCKDRFILKAWNNCNVVNCNLCVDVYICSRKCRQPFHLRH

SEQ ID NO: 1365 - DNA, 2121 bp, Arabidopsis thaliana
  CDS (1)..(2121)
atgggggagaaggagaggaagaatatcacaaaaatccaaatccccatcgtagtagccatgagttcggtgggtgtttttcataaggtggaaatggatgaaaacctatattttgtatacaaattaacacaaacagattatccaacctcttctggtgaagtactagccatggattccactggcgacgaccaacctcttgatcaacctctttttctatgtcctgatgcacgtatcaaatttcacaagctcaaaatacagagagaggatggtgatatttttgattatgatttcaagtttcatccatacatttcttcccctcacttccccagcaaaagaagcggtgatcaacaaggtgaatctttgcttgattgcgacgaagatggtatctgtaaactccctgtagtccctctcttttggtgcaacaataaagaaagtgattctcgcgaattccagtgcggtggatgcagagattcaatgctcagcgctagctattatgcatgtcttcaatgtgaaaaaaaattccacaaagaatgtgtagagtctcctcttgaaatcaaacacccaacccacctttttcattctcttcgactttactatcatccagcgcctgagttttgcatttgttgtaaaacagaagtcttcatgattttctatcattgtcttacctgcaatttgagtatgcatccagtctgtgcaatgaggaaagtacccttttttattgaccatccaaaaagccatccccaccctctcacttttttccctacacaagcttcgttagtttgccatttttgcgctttgattaagaagcttgatcccacatacatttgtaccaaatgtgtcttcgtaatccataaaggctgtatcggtttcccacatgtcataagaatatcccgtcacacccaccgtatctcttttacttcttctcttccatgtggaaagctttcttgtggagtatgtcatcagcaagtggacaacgattatggtgcatattcttgcaagaaatgtgatgcttattttgttcattcaaaatgtgcattacagagacatgtgtgggatggaaaagatctcgaagaagtgccagaagaagatgatatgatagatgatggtgagccgttcaagaggatagctgatggaataatactacatccttttcatagtcacaatctgcatcttcagacaactagagcttatgacgaaaatacgtattgtcgagggtgtgcccttccaatctacgaaggtcagttctattcatgcattgaaagcgacttcatcctccatgaacattgtgcaaatgctccacgcatgaagcgacatcccttacatccacatccacttacactagttgttgccaccaggggacctggtaatgaggaaggtacatttcaatgtgacgcatgtcatcgtaaaggtactggcttcttctatgagcatcatactgatcaagaaaacatcttcatgctagacatacattgtgcctctattttcgaaccctttcaatatcaaggccatgaacatccattattcctaccttcagaaccaaataaatggggaagatgtcagatgtgcacatacgaatacgttaatttaaatttaaattgcttggaatgcgattatattttatgtttccattgtgctaccttgccatacaaggtaaggtataagcatgacagtcattttctcaagatttgtaatgggaaggaggcaaatgatcaatcatactggtgtgagatttgtgaaggcaagatagaggaaggaacggaaagagcgttttacaatactccaaagaaggacacgtcattttacaaatgcaatgcctgctgcaccactcttcatcaacggtgcttacttgggatagatacttacatgaaacctggagaaactgtaaaagactacctttcttcaatcaagtatgcatctgaaggtcaaagcaaggaatcaatcacagatgttcagattcttctgaacagttctcccacccgaccaatttgcactcgatgtctttgtcgttgtccatttccaattttttttaaagggcataacacaatattttgttcttgggattgtgttgaagattcggccatgcgatcctaccaacgacttctctattcgtttctatggggttaa

SEQ ID NO: 1366 - protein, 706 aa, Arabidopsis thaliana
MGEKERKNITKIQIPIVVAMSSVGVFHKVEMDENLYFVYKLTQTDYPTSSGEVLAMDSTGDDQPLDQPLFLCPDARIKFHKLKIQREDGDIFDYDFKFHPYISSPHFPSKRSGDQQGESLLDCDEDGICKLPVVPLFWCNNKESDSREFQCGGCRDSMLSASYYACLQCEKKFHKECVESPLEIKHPTHLFHSLRLYYHPAPEFCICCKTEVFMIFYHCLTCNLSMHPVCAMRKVPFFIDHPKSHPHPLTFFPTQASLVCHFCALIKKLDPTYICTKCVFVIHKGCIGFPHVIRISRHTHRISFTSSLPCGKLSCGVCHQQVDNDYGAYSCKKCDAYFVHSKCALQRHVWDGKDLEEVPEEDDMIDDGEPFKRIADGIILHPFHSHNLHLQTTRAYDENTYCRGCALPIYEGQFYSCIESDFILHEHCANAPRMKRHPLHPHPLTLVVATRGPGNEEGTFQCDACHRKGTGFFYEHHTDQENIFMLDIHCASIFEPFQYQGHEHPLFLPSEPNKWGRCQMCTYEYVNLNLNCLECDYILCFHCATLPYKVRYKHDSHFLKICNGKEANDQSYWCEICEGKIEEGTERAFYNTPKKDTSFYKCNACCTTLHQRCLLGIDTYMKPGETVKDYLSSIKYASEGQSKESITDVQILLNSSPTRPICTRCLCRCPFPIFFKGHNTIFCSWDCVEDSAMRSYQRLLYSFLWG

SEQ ID NO: 1367 - DNA, 1746 bp, Arabidopsis thaliana
  CDS (1)..(1746)
atggacggaagcaaaagtaagcccttgtgtcgtatgtctgatctagcaaagcctcacaaacttggccgacgatttgatccaccgctcaccgtttgcatctcctgcaaaggccaacaatacactgggaataggcgtgggtactattactattgtgctacttgtgatttggaattccacaaaggttgttacttgtttcctccagaaatcaaacaccctttccacctcatccaccctctcaccctcaccttcttagatcataatcttgttagctctgcgatccctgaaatttggtttctgttaagcacggaatatccatacaagcatatgtttggagatgaagaagaatgtgcttcagatgggaatcataaaagatgcaactcttgtcggaaaaagatcacataccgcgacccagactatccttcgttttttgatataacatattatcattgttctatctgcaatttcagtctacactcttcttgcgtaaaggattcaccacctcatactattgaaaacctaaaaagccatgaacacactcttaccctctttcctagactactccctttgccctgtgatgcttgtggtttttcacttgacgctcgcaatgattcagtttactcttttgctgttccttctggtgatgagctctcttgtggtgtttgtcgcaaactcgttgacgtcaactacgggcaatacgcttgcaaaaagggatgccactatgctgtccattcgaaatgtgcaacaaagaatgaagtgtgggatggtaaagatcttgatggagtgcctgaggaagaagaagaagagattgagccattcgtgaggattgacgaagagacaatacaacatttcagtcatgaccatcactatctaaagattcatcatgggaatgacaaccatgaaaacaagttttgccaagcttgcatccttcggataacagtttcggatagcttctatagctgtgtacaatgcgattttgtcatccacgaaacatgtgcaggccttcctcgcataaaacaccatccactacacaaacacccgctcaccctctaccatttacactatcctcatctcaacgaggtccagtctaaatactatgacctaggtttcttcgcgtgtagtggttgtagccgagaatgttgtggtttcatgtacaagtgttgtgaaaaggattgtgactttcaactagatgcaaggtgtgcttcgcttcctgatcctataatccatgactgccatccacatgatcaccctctcttcttcaatttgaccgaaggtgaatgcatggtttgtaagattacatccggattaagaaagtacttagaatgtattgaatgcaggtccttttcgtgtcttacttgtgctactatgcctctggtggctcactacaagtacgataaacatccactcactctttgctgtggagaagaaaagacaaaagatctccagtattggtgcgagatttgtgaatcagaaatagatgcacaaaagtggttctacacatgcagctattgttctgtcactcttcatgttacatgtttactgggagataaggtctacatgaagccaaaccatatgatcaagatgtacgaaggtgcaaaaacaagtattggtattgtacccaacagtggtaactctagaccaatgtgtgatggatgtagaagccgttgtgtggacactttggtagtcaagacgtctgggaaaaactattgtactatcatgtgtttcttcgatatatattatccatggtag

SEQ ID NO: 1368 - protein, 581 aa, Arabidopsis thaliana
MDGSKSKPLCRMSDLAKPHKLGRRFDPPLTVCISCKGQQYTGNRRGYYYYCATCDLEFHKGCYLFPPEIKHPFHLIHPLTLTFLDHNLVSSAIPEIWFLLSTEYPYKHMFGDEEECASDGNHKRCNSCRKKITYRDPDYPSFFDITYYHCSICNFSLHSSCVKDSPPHTIENLKSHEHTLTLFPRLLPLPCDACGFSLDARNDSVYSFAVPSGDELSCGVCRKLVDVNYGQYACKKGCHYAVHSKCATKNEVWDGKDLDGVPEEEEEEIEPFVRIDEETIQHFSHDHHYLKIHHGNDNHENKFCQACILRITVSDSFYSCVQCDFVIHETCAGLPRIKHHPLHKHPLTLYHLHYPHLNEVQSKYYDLGFFACSGCSRECCGFMYKCCEKDCDFQLDARCASLPDPIIHDCHPHDHPLFFNLTEGECMVCKITSGLRKYLECIECRSFSCLTCATMPLVAHYKYDKHPLTLCCGEEKTKDLQYWCEICESEIDAQKWFYTCSYCSVTLHVTCLLGDKVYMKPNHMIKMYEGAKTSIGIVPNSGNSRPMCDGCRSRCVDTLVVKTSGKNYCTIMCFFDIYYPW

SEQ ID NO: 1369 - DNA, 1602 bp, Arabidopsis thaliana
  CDS (1)..(1602)
atgaattccaattcagtgggtgcatttcgtgagagggaaatcgatggaaaaccattttacattgtcactttttcttctcaaacagacaccacaatcccttcttcctctggtgaaacagccattgatggcgatcacgacctctcttttcaacaacctcttttcctctgtccttctttacgtcttaaagctgacgaggaaaactattcttatagtgaacttctcccgttcaatatttccccgctcttccccagcataagtagcgctgatcaacaagtccagcatttgcttgattccgacagccgtgatgctaatatctgtaagctccctgttgtccctatctattggtgtaacaataaacacggtgattatgctcaattcatttgccgtgcatgtgacacattcaagattgacacagactattatatatgtctcacatgtgatcaaatgttccacaaagaatgcgtggagtctccgcttgagctcaaaaacccttcgtatcaaaaaccatgcgtgagttgcatgtgctgtgatttagctctctttagcttgttttatcattgtcccacctacgaacttagtatgcatcccgtttgtgcgatgaagccaatacccattttcatagacaactcaaaaaggcatccccaccttctcaccttttttcccaaacaagcttccttactttgcgatgtttgtggcctcattaaagaagctttccccacctatgtgtgtcctcgatgtatctttgtagcccatcaagattgtatctattttccatatgtcatcaaaatatatcgtcaccaacaccgtatctcttttacctcttctcttccatctggaaaatggtcttgtggagtctgtcgtaggaaggttgacaacaattgtggtgcatacacttgcaacaagtgtagccactattttgttcatacaagatgtgcgttgcgcaacgacgtgtgggatggaagggatctcgagggagtacctgaagaacctgaaataattctcgagctatttgagacgatagctgatggaataatactccatttttctcatgaccatcatcaaggccatttttctgatggaacaattgtgcatcctttattcctagctttagacccagaccaagaacttgaggcaacttgtcaaatctgccaacagaaagctacttttcttcaaaaactaaattgcatcgaatgtgattatgttatttgttttaagtgtgctactttaccatacgaggcaaagtataagcacgacacacatctcctcacattctgggaagggaaagaggaaagtgatcaatacggctggtgtgaggtctgcgaaaatcaaatagtatactcaagagaagatggcttctatgcttgtgatgactgctgcaccactcttcatgttcattgtttgcttggagaagacatgtatatgctgaaacctagtcaaaccataacgtatattaagagggaggttcatatccttcccaacaatacccggtctcgaccattatgccattatcatgttgataaccgttgtccacaaaaagtagttttcaaatcggaggacatgacattttgttcgttccgttgttttacacgaaacgctgtgtaa

SEQ ID NO: 1370 - protein, 533 aa, Arabidopsis thaliana
MNSNSVGAFREREIDGKPFYIVTFSSQTDTTIPSSSGETAIDGDHDLSFQQPLFLCPSLRLKADEENYSYSELLPFNISPLFPSISSADQQVQHLLDSDSRDANICKLPVVPIYWCNNKHGDYAQFICRACDTFKIDTDYYICLTCDQMFHKECVESPLELKNPSYQKPCVSCMCCDLALFSLFYHCPTYELSMHPVCAMKPIPIFIDNSKRHPHLLTFFPKQASLLCDVCGLIKEAFPTYVCPRCIFVAHQDCIYFPYVIKIYRHQHRISFTSSLPSGKWSCGVCRRKVDNNCGAYTCNKCSHYFVHTRCALRNDVWDGRDLEGVPEEPEIILELFETIADGIILHFSHDHHQGHFSDGTIVHPLFLALDPDQELEATCQICQQKATFLQKLNCIECDYVICFKCATLPYEAKYKHDTHLLTFWEGKEESDQYGWCEVCENQIVYSREDGFYACDDCCTTLHVHCLLGEDMYMLKPSQTITYIKREVHILPNNTRSRPLCHYHVDNRCPQKVVFKSEDMTFCSFRCFTRNAV

SEQ ID NO: 1371 - DNA, 1956 bp, Arabidopsis thaliana
  CDS (1)..(1956)
atgtattcaaattcagtgggtgagtttcgtgagggagaaatcgatggaaaactatttctcatatacactttgtcatctcaaacagagagcctttcttccggtgaagcagcggttgattccgatggtggggacggcctctctcttgagcctcggatcctctgtcctactttccgtctcaaagttaaaaagttgaaaccatacacgagagattcagatcgtagctttttcccgttggttgtttcccctcacttccccaccatacaaagtggtcatgaacaacccgagtatatgcttcattccgacagctgtaagctacctttactccctctcttttggtgcaacaataaaaaacctcatcttttcgatttcatttgccgtgcatgcacaaccctagagccagccacaagctattacgtttgtgtcacatgtggtgaccagttccacaaagaatgtattggttctccacttgagttcaaacacccttcatatccgtctctttctctccaactttacagtcctccgtccgaccgcgtattctgctcatgttgtcaaaaacgtatcgatggcctgaattattatagtcctaccaacaacttcactctgcatctattttgtgcattcaaaccaataccctttgttatagatcacccaaaaaggcatccccatcctctcaccattttccccaaacaatctttcttaccttgccatgtttgtagcctcataaaaggacatattcccacctatgtttgtgttagatgtgtatttgtagttcatcaagattgtatctatttcccgtatgtcataaaaatatcccgtcaccaccaccgtatatcttatacctcctctcttccatctggaaaatggtcttgcggagtctgtcgtcaaatggttgacaacgactatggtgcctactcttgcaacaagtgtgatgactattttgttcattcaagatgcgcgctgcggagagacttatgggatgggatagaactcgagggagtacctgaagaacctgagatagttgttgagccatttatcacgatttctgatggtataatactccatttttctcatggccatcatctgaaactcaagatcagtagagtctacgacgaaaaaatggtttgtcaagcgtgcatccttccgatctacgagggtggctattattcatgtatggatgaatgtgacttcatcctccacgaaacatgtgcaaatgcaccttgcaagaaacatcatgctttgcatcctcacccacttacgctaacggtcgtcactagtgaatatgaagacaacataggacgtttttgttgtaaggcttgtcagcgtgaaagttgtggtttcgtctatgaggatctcagaggaaagattggtaattatagaagaaataaattccaactagatttacgatgtgcctcagtttctgaaccatttgaatatctaggccataagcatctcttatacctagctttgaatccagaagaagaaaagttagcaatatgtcaaatctgccacgaaagggaagatgagtcttctcattgcagaaaactaaattgcattgaatgtgattttgtgatatgcttcaggtgtgctaccttaccatataaggcaaggtatcaacatgacaagcatttcctcaaattttatgagacgaaagaggcaaatgatcattcagaaacgaaagggttctattcatgcgacgactgctgcaccactcttcatattgattgtttgcttggggaagacatgtatatgaagcctggtcacaccataatgtataatatgacgggtttcgacgaacattatgagaagaagcttcgtattcttcgcaacaatactttgtctcggccatgttgcagtacatgcgggcagcgttgtcgacagaaaatagttttcaaatacaaagaacaccatatattttgtgctatatcttgccagaagcatgtaattaattactcatag

SEQ ID NO: 1372 - protein, 651 aa, Arabidopsis thaliana
MYSNSVGEFREGEIDGKLFLIYTLSSQTESLSSGEAAVDSDGGDGLSLEPRILCPTFRLKVKKLKPYTRDSDRSFFPLVVSPHFPTIQSGHEQPEYMLHSDSCKLPLLPLFWCNNKKPHLFDFICRACTTLEPATSYYVCVTCGDQFHKECIGSPLEFKHPSYPSLSLQLYSPPSDRVFCSCCQKRIDGLNYYSPTNNFTLHLFCAFKPIPFVIDHPKRHPHPLTIFPKQSFLPCHVCSLIKGHIPTYVCVRCVFVVHQDCIYFPYVIKISRHHHRISYTSSLPSGKWSCGVCRQMVDNDYGAYSCNKCDDYFVHSRCALRRDLWDGIELEGVPEEPEIVVEPFITISDGIILHFSHGHHLKLKISRVYDEKMVCQACILPIYEGGYYSCMDECDFILHETCANAPCKKHHALHPHPLTLTVVTSEYEDNIGRFCCKACQRESCGFVYEDLRGKIGNYRRNKFQLDLRCASVSEPFEYLGHKHLLYLALNPEEEKLAICQICHEREDESSHCRKLNCIECDFVICFRCATLPYKARYQHDKHFLKFYETKEANDHSETKGFYSCDDCCTTLHIDCLLGEDMYMKPGHTIMYNMTGFDEHYEKKLRILRNNTLSRPCCSTCGQRCRQKIVFKYKEHHIFCAISCQKHVINYS

SEQ ID NO: 1373 - DNA, 27 bp, Artificial sequence
  primer
atagagctcaccattccacacatacac

SEQ ID NO: 1374 - DNA, 32 bp, Artificial sequence
  primer
atacccgggccatcatcatcatggctgttgtc

SEQ ID NO: 1375 - DNA, 22 bp, Artificial sequence
  primer
atgaattcaaattcagtcggtg

SEQ ID NO: 1376 - DNA, 23 bp, Artificial sequence
  primer
ctaatccatcgaacaactgtaag

SEQ ID NO: 1377 - DNA, 27 bp, Artificial sequence
  primer
ataccatggaccattccacacatacac

SEQ ID NO: 1378 - DNA, 34 bp, Artificial sequence
  primer
atattaattaaccatcatcatcatggctgttgtc

SEQ ID NO: 1379 - DNA, 27 bp, Artificial sequence
  primer
ataggtaccaccattccacacatacac

SEQ ID NO: 1380 - DNA, 32 bp, Artificial sequence
  primer
atagtcgacccatcatcatcatggctgttgtc

SEQ ID NO: 1381 - protein, 584 aa, Artificial sequence
  consensus sequence
  Variant (2)..(3): Xaa in position 2 to 3 is any amino acid
  Variant (5)..(6): Xaa in position 5 to 6 is any amino acid
  Variant (7)..(22): Xaa in position 7 to 22 is any or no amino acid
  Variant (24)..(24): Xaa in position 24 is any amino acid
  Variant (26)..(27): Xaa in position 26 to 27 is any amino acid
  Variant (29)..(42): Xaa in position 29 to 42 is any amino acid
  Variant (43)..(50): Xaa in position 43 to 50 is any or no amino acid
  Variant (52)..(52): Xaa in position 52 is any amino acid
  Variant (54)..(54): Xaa in position 54 is any amino acid
  Variant (56)..(56): Xaa in position 56 is any amino acid
  Variant (58)..(66): Xaa in position 58 to 66 is any amino acid
  Variant (67)..(69): Xaa in position 67 to 69 is any or no amino acid
  Variant (71)..(72): Xaa in position 71 to 72 is any amino acid
  Variant (74)..(77): Xaa in position 74 to 77 is any amino acid
  Variant (78)..(89): Xaa in position 78 to 89 is any or no amino acid
  Variant (91)..(91): Xaa in position 91 is any amino acid
  Variant (93)..(93): Xaa in position 93 is any amino acid
  Variant (94)..(100): Xaa in position 94 to 100 is any or no amino acid
  Variant (102)..(102): Xaa in position 102 is any amino acid
  Variant (103)..(103): Xaa in position 103 is any or no amino acid
  Variant (105)..(106): Xaa in position 105 to 106 is any amino acid
  Variant (107)..(107): Xaa in position 107 is any or no amino acid
  Variant (109)..(110): Xaa in position 109 to 110 is any amino acid
  Variant (112)..(112): Xaa in position 112 is any amino acid
  Variant (114)..(114): Xaa in position 114 is any amino acid
  Variant (117)..(117): Xaa in position 117 is any amino acid
  Variant (120)..(120): Xaa in position 120 is any amino acid
  Variant (122)..(124): Xaa in position 122 to 124 is any amino acid
  Variant (125)..(134): Xaa in position 125 to 134 is any or no amino acid
  Variant (139)..(146): Xaa in position 139 to 146 is any amino acid
  Variant (148)..(148): Xaa in position 148 is any amino acid
  Variant (150)..(150): Xaa in position 150 is any amino acid
  Variant (152)..(156): Xaa in position 152 to 156 is any amino acid
  Variant (157)..(158): Xaa in position 157 to 158 is any or no amino acid
  Variant (160)..(161): Xaa in position 160 to 161 is any amino acid
  Variant (163)..(164): Xaa in position 163 to 164 is any amino acid
  Variant (167)..(170): Xaa in position 167 to 170 is any amino acid
  Variant (175)..(176): Xaa in position 175 to 176 is any amino acid
  Variant (179)..(181): Xaa in position 179 to 181 is any amino acid
  Variant (183)..(187): Xaa in position 183 to 187 is any amino acid
  Variant (188)..(193): Xaa in position 188 to 193 is any or no amino acid
  Variant (195)..(202): Xaa in position 195 to 202 is any amino acid
  Variant (203)..(203): Xaa in position 203 is any or no amino acid
  Variant (205)..(205): Xaa in position 205 is any amino acid
  Variant (208)..(208): Xaa in position 208 is any amino acid
  Variant (210)..(212): Xaa in position 210 to 212 is any amino acid
  Variant (213)..(230): Xaa in position 213 to 230 is any or no amino acid
  Variant (232)..(232): Xaa in position 232 is any amino acid
  Variant (235)..(236): Xaa in position 235 to 236 is any amino acid
  Variant (239)..(242): Xaa in position 239 to 242 is any amino acid
  Variant (243)..(244): Xaa in position 243 to 244 is any or no amino acid
  Variant (246)..(246): Xaa in position 246 is any amino acid
  Variant (248)..(249): Xaa in position 248 to 249 is any amino acid
  Variant (250)..(251): Xaa in position 250 to 251 is any or no amino acid
  Variant (253)..(253): Xaa in position 253 is any amino acid
  Variant (255)..(255): Xaa in position 255 is any amino acid
  Variant (258)..(259): Xaa in position 258 to 259 is any amino acid
  Variant (262)..(268): Xaa in position 262 to 268 is any amino acid
  Variant (270)..(272): Xaa in position 270 to 272 is any amino acid
  Variant (273)..(277): Xaa in position 273 to 277 is any or no amino acid
  Variant (279)..(292): Xaa in position 279 to 292 is any amino acid
  Variant (293)..(316): Xaa in position 293 to 316 is any or no amino acid
  Variant (319)..(319): Xaa in position 319 is any amino acid
  Variant (321)..(324): Xaa in position 321 to 324 is any amino acid
  Variant (325)..(338): Xaa in position 325 to 338 is any or no amino acid
  Variant (340)..(341): Xaa in position 340 to 341 is any amino acid
  Variant (343)..(346): Xaa in position 343 to 346 is any amino acid
  Variant (347)..(348): Xaa in position 347 to 348 is any or no amino acid
  Variant (350)..(353): Xaa in position 350 to 353 is any amino acid
  Variant (354)..(354): Xaa in position 354 is any or no amino acid
  Variant (356)..(374): Xaa in position 356 to 374 is any amino acid
  Variant (375)..(409): Xaa in position 375 to 409 is any or no amino acid
  Variant (412)..(413): Xaa in position 412 to 413 is any amino acid
  Variant (415)..(419): Xaa in position 415 to 419 is any amino acid
  Variant (420)..(422): Xaa in position 420 to 422 is any or no amino acid
  Variant (424)..(424): Xaa in position 424 is any amino acid
  Variant (426)..(426): Xaa in position 426 is any amino acid
  Variant (428)..(431): Xaa in position 428 to 431 is any amino acid
  Variant (433)..(436): Xaa in position 433 to 436 is any amino acid
  Variant (437)..(444): Xaa in position 437 to 444 is any or no amino acid
  Variant (447)..(448): Xaa in position 447 to 448 is any amino acid
  Variant (451)..(454): Xaa in position 451 to 454 is any amino acid
  Variant (455)..(486): Xaa in position 455 to 486 is any or no amino acid
  Variant (488)..(491): Xaa in position 488 to 491 is any amino acid
  Variant (493)..(494): Xaa in position 493 to 494 is any amino acid
  Variant (496)..(497): Xaa in position 496 to 497 is any amino acid
  Variant (499)..(501): Xaa in position 499 to 501 is any amino acid
  Variant (502)..(535): Xaa in position 502 to 535 is any or no amino acid
  Variant (537)..(537): Xaa in position 537 is any amino acid
  Variant (538)..(571): Xaa in position 538 to 571 is any or no amino acid
  Variant (573)..(573): Xaa in position 573 is any amino acid
  Variant (574)..(574): Xaa in position 574 is any or no amino acid
  Variant (576)..(578): Xaa in position 576 to 578 is any amino acid
  Variant (579)..(583): Xaa in position 579 to 583 is any or no amino acid
CXXCXXXXXXXXXXXXXXXXXXYXCXXCXXXXXXXXXXXXXXXXXXXXXXKXHXHXLXXXXXXXXXXXXCXXCXXXXXXXXXXXXXXXXYXCXXXXXXXXHXXCXXXPXXIXIXRHXHRXSXXXXXXXXXXXXXCGVCXXXXXXXXGXYXCXXXXXXXYXXHXXCAXXXXVWDGXXLEXXXEXXXXXXXXXXXPXXXXXXXXXIXHFXHXXXXXXXXXXXXXXXXXXXXXCXACXXPIXXXXXXYXCXXXXCXFXLHXXCAXXXXXXXHXXXXXXXXLXXXXXXXXXXXXXXXXXXXXXXXXXXXXXXXXXXXXXXGFXYXXXXXXXXXXXXXXXXXXDXXCXXXXXXPXXXXXHXXXXXXXXXXXXXXXXXXXXXXXXXXXXXXXXXXXXXXXXXXXXXXXXXXXXXXCAXXPXXXXXXXXDXHXLXXXXGXXXXXXXXXXXXWCXXCEXXXXXXXXXXXXXXXXXXXXXXXXXXXXXXXXXXXXCXXXXHXXCXXGXXXXXXXXXXXXXXXXXXXXXXXXXXXXXXXXXXXXXNXXXXXXXXXXXXXXXXXXXXXXXXXXXXXXXXXXXRXXCXXXXXXXXC

SEQ ID NO: 1382 - protein, 19 aa, Artificial sequence
  protein pattern
  Variant (2)..(3): Xaa in position 2 to 3 is any amino acid
  Variant (5)..(6): Xaa in position 5 to 6 is any amino acid
  Variant (9)..(12): Xaa in position 9 to 12 is any amino acid
  Variant (13)..(13): Xaa in position 13 is Ile, Leu or Val
  Variant (15)..(15): Xaa in position 15 is Asp or Asn
  Variant (17)..(17): Xaa in position 17 is any amino acid
  Variant (18)..(18): Xaa in position 18 is Asp or Glu
YXXHXXCAXXXXXWXGXXL

SEQ ID NO: 1383 - protein, 17 aa, Artificial sequence
  protein pattern
  Variant (2)..(4): Xaa in position 2 to 4 is any amino acid
  Variant (5)..(5): Xaa in position 5 is Ala, Pro or Thr
  Variant (6)..(7): Xaa in position 6 to 7 is any amino acid
  Variant (9)..(9): Xaa in position 9 is any amino acid
  Variant (10)..(10): Xaa in position 10 is Ile, Met or Val
  Variant (11)..(11): Xaa in position 11 is any amino acid
  Variant (14)..(14): Xaa in position 14 is any amino acid
  Variant (17)..(17): Xaa in position 17 is Ile, Leu or Val
CXXXXXXIXXXRHXHRX

SEQ ID NO: 1384 - protein, 17 aa, Artificial sequence
  protein pattern
  Variant (2)..(2): Xaa in position 2 is Asp, Glu or Gly
  Variant (3)..(3): Xaa in position 3 is Ile or Val
  Variant (5)..(5): Xaa in position 5 is Glu or Arg
  Variant (6)..(8): Xaa in position 6 to 8 is any amino acid
  Variant (9)..(9): Xaa in position 9 is Asp or Asn
  Variant (10)..(14): Xaa in position 10 to 14 is any amino acid
  Variant (16)..(16): Xaa in position 16 is any amino acid
  Variant (17)..(17): Xaa in position 17 is Cys, Gly or Ser
CXXCXXXXXXXXXXYXX

SEQ ID NO: 1385 - DNA, 705 bp, Arabidopsis thaliana
  CDS (1)..(705)
atgtcttcacgacaatcggtgaggcacccgagtcacaaccatccattgcgcggtcacaaatgcgaagccaaagacgaaatcatctgctccggttgtgatctcgatctggttggtgcagctttcaaatgcacaaagtcatcagattgtgattacttcttgcacaagtcatgttttgaacttccacgtgaaaccaaccacaaatctcaccaaccccacactttgactttaatctattccccaaagtcaacgtacacgtgtaatgcttgcggcgaatacggatcaagtttcacgtacaactgttcaatctgtcagtacgatgtacatgtcggatgtgtttcaatgcctgaaacagtgaagcgtgaagatcacccacatccacttactcttctttacggttctccttataaccaacccggtttagtttccaaatgcgatgtttgtgaagacattgtaccggataatctctggtcgtattattgcaaggaatgtgattacgctacgcatttacactcatgtaagaaagaggaagaggcaaagaaagaagatcaaaaaggagaaggaagtaaaaactcgatgaattcggagttagctgcaatgttagaggctcaaagagaagtggagaggatgcagattgagatgcatttggcgatgcaaagtgctttgatttcgaaaaaggcgaataaggcagctctcaattgcatctaa

SEQ ID NO: 1386 - protein, 234 aa, Arabidopsis thaliana
MSSRQSVRHPSHNHPLRGHKCEAKDEIICSGCDLDLVGAAFKCTKSSDCDYFLHKSCFELPRETNHKSHQPHTLTLIYSPKSTYTCNACGEYGSSFTYNCSICQYDVHVGCVSMPETVKREDHPHPLTLLYGSPYNQPGLVSKCDVCEDIVPDNLWSYYCKECDYATHLHSCKKEEEAKKEDQKGEGSKNSMNSELAAMLEAQREVERMQIEMHLAMQSALISKKANKAALNCI

SEQ ID NO: 1387 - DNA, 729 bp, Brassica napus
  CDS (1)..(729)
atggcttcaagtaaaccagcggtgaggcaccctagccacaaccatccattgcgtagtcacaaagctcaagctgaggaagagatcatctgctcaggctgtagcctagacctgataggcgcagctttcaaatgcacaaagtccgaatgcgattacttattgcacaagtcatgtttcgaccttccacgcgagaacagtcacaagtctcaccaggaacaccctttgacccttctgtactctccaacgtacgagtcttcagctttcgcgtgcgacgcatgcggtgagtatggatccgggttttcttacaactgttctatctgtaagtacgatgtgcatgtcggatgtgtgtctatgcccgagaccgtggagcgtgaaggacacgcgcatccgctcacgttgctctaccgtactccttaccagaacggtctgatctttaactgtgatgaatgtcatgacactgttccggataatctctggtcttattactgcaagaaatgtgactatgggacgcatctacactcttgtgcggtcgaggaagagccaaagagaggaggaggaggaagtgggaatactagtaggaacaatggtggaaggagctctgccgcttcggacttagctgcaatgctgaaagctcaaagggaaatggagaggatgcagattgagttacatatggagatgcagagagctaagattgcgaagaaagcgagaaagcatatgctcaaaatgatttaa

SEQ ID NO: 1388 - protein, 242 aa, Brassica napus
MASSKPAVRHPSHNHPLRSHKAQAEEEIICSGCSLDLIGAAFKCTKSECDYLLHKSCFDLPRENSHKSHQEHPLTLLYSPTYESSAFACDACGEYGSGFSYNCSICKYDVHVGCVSMPETVEREGHAHPLTLLYRTPYQNGLIFNCDECHDTVPDNLWSYYCKKCDYGTHLHSCAVEEEPKRGGGGSGNTSRNNGGRSSAASDLAAMLKAQREMERMQIELHMEMQRAKIAKKARKHMLKMI

SEQ ID NO: 1389 - DNA, 729 bp, Brassica napus
  CDS (1)..(729)
atggcttcaagtaaaccagcggtgaggcaccctagccacaaccatccattgcgtagtcacaaagctcaagctgaggaagagatcatctgctcaggctgtagcctagacctgataggcgcagctttcaaatgcacgaagtctgaatgcgattacttcttgcacaagtcatgtttcgagcttccacgcgagaaccgtcacaagtctcacccggaacaccctttgacccttctgtactctccaacgtacgagtcttcagctttcgcgtgcgacgcatgcggtgagtatggatccgggttttcttacaactgttctatctgtaagtacgatgtgcatgtcggatgtgtgtctatgcccgagaccgtggagcgtgaaggacacgcgcatccgctcacgttgctctaccgtactccttaccagaacggtctgatctttaactgtgatgaatgtcatgacactgttccggataatctctggtcttattactgcaagaaatgtgactatgggacgcatctacactcttgtgcggtcgaggaagagccaaagagaggaggaggaggaagtgggaatactagtaggaacaatggtggaaggagctctgccgcttcggacttatctgcaatgttgaaagctcaaagggaaatggagaggatgcagattgagttagatatggcgatgcagagtgctaagattgcgaagaaatcgagaaagcatatgctcaaaatgatttaa

SEQ ID NO: 1390 - protein, 242 aa, Brassica napus
MASSKPAVRHPSHNHPLRSHKAQAEEEIICSGCSLDLIGAAFKCTKSECDYFLHKSCFELPRENRHKSHPEHPLTLLYSPTYESSAFACDACGEYGSGFSYNCSICKYDVHVGCVSMPETVEREGHAHPLTLLYRTPYQNGLIFNCDECHDTVPDNLWSYYCKKCDYGTHLHSCAVEEEPKRGGGGSGNTSRNNGGRSSAASDLSAMLKAQREMERMQIELDMAMQSAKIAKKSRKHMLKMI

SEQ ID NO: 1391 - DNA, 747 bp, Arabidopsis thaliana
  CDS (1)..(747)
atggcttcccgcccttcagtgagacacccgagccacaaccatccattacgcggtcacaaagcccaagttgaagatgagatcatctgctctggttgcgacctagacctactcggtgcatatttcaagtgcacaaagtcagagtgtgattacttcttgcacaagtcatgtttcgatctcccacgtgagatccgtcacaagtctcaccctgatcaccctttgatcctcctctattccccacagaataataattcaacgtatacttgtgacgcatgcggtgagtatggatcggggttcacttacaattgttctatctgccagtacgatgttcatgttggatgtgtgtctgtgcctgagaccatgaagcatgatgagcacgttcacccgctcgctttgatctacaaggctccatgcccaaaggatcatatatttacctgcgatgtttgcgatgaaactatgccgcataatctgtggttgtactactgccagaaatgtgactacggtgctcatttacattcatgcgttgctgaagaagaggaaaagtcaaagaaaggaggaagaggaagaggaggagaaggaggaagtggtggaaatggagtgaacagaggaaggagctccgcgaattcagagctagctgcaatgttaaaggcacaaagagagatggagcagatgcaaattgctcttcacttggagatgcaaagagctaagattgataagaaatcaagaaagcatatgcttaaaatgatctaa

SEQ ID NO: 1392 - protein, 248 aa, Arabidopsis thaliana
MASRPSVRHPSHNHPLRGHKAQVEDEIICSGCDLDLLGAYFKCTKSECDYFLHKSCFDLPREIRHKSHPDHPLILLYSPQNNNSTYTCDACGEYGSGFTYNCSICQYDVHVGCVSVPETMKHDEHVHPLALIYKAPCPKDHIFTCDVCDETMPHNLWLYYCQKCDYGAHLHSCVAEEEEKSKKGGRGRGGEGGSGGNGVNRGRSSANSELAAMLKAQREMEQMQIALHLEMQRAKIDKKSRKHMLKMI

SEQ ID NO: 1393 - DNA, 747 bp, Arabidopsis thaliana
  CDS (1)..(747)
atgggttcaggaaaaactaaccgtccatcagtgagacacccgagtcacaatcatccgttgcgggtcttcaactccaaagaagaagatgagatcatttgctccggatgcgaacatgatctaattgggcaagctttcaagtgtacaaagtcagagtgcgattacttcttgcacaagtcatgtttcgaccttcccggtgagatccatcacaagtctcacacaaatcaccctttgaccttgctccattctccaccgaatggcctatccacttacacgtgcgatgcgtgcggtgagtatggatctgctttcacttaccattgctcagagtgcaaataccatgttcacgtgggatgtgcgtttgtccccgagaacgtgaagcgtgaagatcacgaacacccactcactctactttacaacacaccatgcaaaggtcgtaaggacggtgtggtgttcatatgtgatgtttgcgaagtagatgtgtcggagaatctttgggtgtattactgcaaagaatgtgactatgggacacatgttcattcatgcacgacaaatgaagacaatgggccaaaaaaaggaggagaagaagaaggagaatcaagctcattatcgacttcaaggataaagtcattaatggaggctgaaaaagagatgagagagatggcgataatacatcaactacagttagatgctcttgacgcagcaggtagttatgtcggttcatgggaaccaaggagaaaagattattggtaa

SEQ ID NO: 1394 - protein, 248 aa, Arabidopsis thaliana
MGSGKTNRPSVRHPSHNHPLRVFNSKEEDEIICSGCEHDLIGQAFKCTKSECDYFLHKSCFDLPGEIHHKSHTNHPLTLLHSPPNGLSTYTCDACGEYGSAFTYHCSECKYHVHVGCAFVPENVKREDHEHPLTLLYNTPCKGRKDGVVFICDVCEVDVSENLWVYYCKECDYGTHVHSCTTNEDNGPKKGGEEEGESSSLSTSRIKSLMEAEKEMREMAIIHQLQLDALDAAGSYVGSWEPRRKDYW

SEQ ID NO: 1395 - DNA, 753 bp, Arabidopsis thaliana
  CDS (1)..(753)
atggccgcaagaaaaccgtcggtgaggcatccgagccacaaccatccattgcgcagtcacaaggcccaagttgaagaagagatcatttgctctggttgcgacctcgacctgataggtgcagctttcaaatgcacaaagtcagaatgcgattacttcttgcacaagtcatgttttgagcttccacgtgagactcgtcacaaggctcacccggatcaccctttgatactgctgtattccccaccttacgagtcaacttacacgtgtgatgcgtgcggtgagtatggatccggattcacttacaactgctctatctgccagtacgatgttcatgttggatgtgtgtccatgcctgagtccgtggagcgtgaaggacacgcacatccactcacattgctctaccgttctccttaccagaacggtttgatctttaactgtgatgtttgccaagagactgttccagataatctctggtcgtattattgcaaggaatgtgattatggcacgcatttacattcttgcgcggtagaggaagaagaagcagaagaagaagagccaaaaagaggaggaggaagtgcaagaggaaacacaaagagtggtgggaataaaggaggaaggggctcagcggcatcggagttagctgcaatgttggaagctcaaagagagatggagaagatgcagatagagttacatatggagatgcaaagagctaagattgctaagaaagcgagaaaggcttgtctcaagttgatctaa

SEQ ID NO: 1396 - protein, 250 aa, Arabidopsis thaliana
MAARKPSVRHPSHNHPLRSHKAQVEEEIICSGCDLDLIGAAFKCTKSECDYFLHKSCFELPRETRHKAHPDHPLILLYSPPYESTYTCDACGEYGSGFTYNCSICQYDVHVGCVSMPESVEREGHAHPLTLLYRSPYQNGLIFNCDVCQETVPDNLWSYYCKECDYGTHLHSCAVEEEEAEEEEPKRGGGSARGNTKSGGNKGGRGSAASELAAMLEAQREMEKMQIELHMEMQRAKIAKKARKACLKLI

SEQ ID NO: 1397 - DNA, 744 bp, Arabidopsis thaliana
  CDS (1)..(744)
atggcttcaagaaaacctgttaatcgcccatccgtgaggcacgcgagtcacaaccatccgctgcgtgtctttaaagctcgagacgaagatgaggtcgtttgctctggatgcgagctcgagctaaccggacaagctttcaagtgtatgaagtcagattgtgattacttcttgcacaagtcatgtttcgacctacctcgtgaaaccaatcacaagtctcacccaaaccactctttgaccctgcttcattccccaccgtacggtcagtcttacacatgcgacgcatgcggtgagtacggatctggtttcacttacaattgttctgaatgtcaatatgatgttcatgtcggatgtgcttttatccctgagaccgtggagcgcgaagatcacgaacacccactcacgcttctctacaacacaccatgcaaaggtcgtgaggacggtgctaagttcatatgtgatgtttgtgaagaaaaaatgtcggaaaatctttgggtttattactgcaaagagtgtgattatgggacgcatgtgcattcttgcgcggtctatgaagatcatgagtcagagaaaagaggaggaggtagggaagaaggagaagcgagctctgcggtttcaaggatgaaatcgttgatgaaggctcaagatgagatggcggcgttacagctcgaggcacgtattagaaacgacactaataatgctatactcgatttatgggatagtccaaagcggagatattattattga

SEQ ID NO: 1398 - protein, 247 aa, Arabidopsis thaliana
MASRKPVNRPSVRHASHNHPLRVFKARDEDEVVCSGCELELTGQAFKCMKSDCDYFLHKSCFDLPRETNHKSHPNHSLTLLHSPPYGQSYTCDACGEYGSGFTYNCSECQYDVHVGCAFIPETVEREDHEHPLTLLYNTPCKGREDGAKFICDVCEEKMSENLWVYYCKECDYGTHVHSCAVYEDHESEKRGGGREEGEASSAVSRMKSLMKAQDEMAALQLEARIRNDTNNAILDLWDSPKRRYYY

SEQ ID NO: 1399 - DNA, 630 bp, Arabidopsis thaliana
  CDS (1)..(630)
atggcttcaaaaaaacctgttaatcgcccatccgtgaggcatgcgagtcataaccatccgctgcgtgtctttaaagctcgagacgaagatgaggtcgtctgctctggatgtgagctcgatctaacgggacaagctttcaagtgtataaatgagacttacacgtgtgatgcatgcggtgagtacggatccggattcacttacaattgttctgaatgtcaatatgatcttcatgtcggatgtgcgtttatcccggagaccgtggagcgggaagatcacgaacacccactcactcttctctacaatacaccatgcaaaggctgtgaggacggtgcgatgttcatatgtaatgtttgtgaagaagatatgtcggagaatctatgggtttattattgcaaagaatgtgattatgggacgcatgtgcattcttgcgcggtttatgaagacgatgagccaaataatagaggaggagaagaaggagaagcgatgagctcggcggtttcgaggatgaagtcgttgatgaaggctgaggatgagttggcggcggtacagctcgaggcacgtatgaagcgagacgctaataatgctatactcggtttatatgctgaaccaaagcggagatattattggtga

SEQ ID NO: 1400 - protein, 209 aa, Arabidopsis thaliana
MASKKPVNRPSVRHASHNHPLRVFKARDEDEVVCSGCELDLTGQAFKCINETYTCDACGEYGSGFTYNCSECQYDLHVGCAFIPETVEREDHEHPLTLLYNTPCKGCEDGAMFICNVCEEDMSENLWVYYCKECDYGTHVHSCAVYEDDEPNNRGGEEGEAMSSAVSRMKSLMKAEDELAAVQLEARMKRDANNAILGLYAEPKRRYYW

SEQ ID NO: 1401 - DNA, 753 bp, Arabidopsis thaliana
  CDS (1)..(753)
atggcttcaagaaaaccaaaggccaaaccggttaatcgccaatctgtgaggcacccaagtcacaaccatccgctgcgtgtctttaaagccaaagaagaggatgagaccgcatgctctggctgcgagctagagctgaccgggcaagctttcaaatgtataaagtcagagtgcgattacttcttacacaagtcatgtttcgaccttcctagtgagaccaataacaagtctcaccaggaccaccctctgaccttgcttcattccccaccagatgatcggtctgtctacacgtgtgacgcgtgtgaccaatacggatctggattttcttaccattgctcaaactgcaactacagtcttcatgtgggatgtgcgtttatccctgaaaccgtagatcgtgaagatcatgaacatccactcactcttctttattgcacaccgtgtaaaggacgtgaagacacgtacttcacttgcagcgcttgtgatgaaactatttcagaagatctatggatgtattactgtaaggattgtgactatggaacacatctacactcatgtgcggcatatgaagaccaagggaaagaagaagaagatgaagacgaagaaggagaagcgagttctccagcttctaggataaagtcgttgatgaaggcgcaagacgagatggcggctatgcagctagaggcacgtattgagaatgatgcgaggaatgctgcacttgatctgtgggatgaaccaaaacgtagatactattggtga

SEQ ID NO: 1402 - protein, 250 aa, Arabidopsis thaliana
MASRKPKAKPVNRQSVRHPSHNHPLRVFKAKEEDETACSGCELELTGQAFKCIKSECDYFLHKSCFDLPSETNNKSHQDHPLTLLHSPPDDRSVYTCDACDQYGSGFSYHCSNCNYSLHVGCAFIPETVDREDHEHPLTLLYCTPCKGREDTYFTCSACDETISEDLWMYYCKDCDYGTHLHSCAAYEDQGKEEEDEDEEGEASSPASRIKSLMKAQDEMAAMQLEARIENDARNAALDLWDEPKRRYYW

SEQ ID NO: 1403 - DNA, 27 bp, Artificial sequence
  primer
atagagctccggtcacaaatgcgaagc

SEQ ID NO: 1404 - DNA, 32 bp, Artificial sequence
  primer
atacccggggtttcaggcattgaaacacatcc

SEQ ID NO: 1405 - DNA, 21 bp, Artificial sequence
  primer
atgtcttcacgacaatcggtg

SEQ ID NO: 1406 - DNA, 22 bp, Artificial sequence
  primer
ttagatgcaattgagagctgcc

SEQ ID NO: 1407 - DNA, 27 bp, Artificial sequence
  primer
ataccatggcggtcacaaatgcgaagc

SEQ ID NO: 1408 - DNA, 34 bp, Artificial sequence
  primer
atattaattaagtttcaggcattgaaacacatcc

SEQ ID NO: 1409 - DNA, 27 bp, Artificial sequence
  primer
ataggtacccggtcacaaatgcgaagc

SEQ ID NO: 1410 - DNA, 32 bp, Artificial sequence
  primer
atagtcgacgtttcaggcattgaaacacatcc

SEQ ID NO: 1411 - protein, 240 aa, Artificial sequence
  consensus sequence
  Variant (2)..(2): Xaa in position 2 is any amino acid
  Variant (4)..(6): Xaa in position 4 to 6 is any amino acid
  Variant (7)..(15): Xaa in position 7 to 15 is any or no amino acid
  Variant (19)..(19): Xaa in position 19 is any amino acid
  Variant (27)..(28): Xaa in position 27 to 28 is any amino acid
  Variant (30)..(32): Xaa in position 30 to 32 is any amino acid
  Variant (34)..(34): Xaa in position 34 is any amino acid
  Variant (36)..(37): Xaa in position 36 to 37 is any amino acid
  Variant (42)..(42): Xaa in position 42 is any amino acid
  Variant (44)..(44): Xaa in position 44 is any amino acid
  Variant (46)..(46): Xaa in position 46 is any amino acid
  Variant (48)..(48): Xaa in position 48 is any amino acid
  Variant (53)..(53): Xaa in position 53 is any amino acid
  Variant (56)..(56): Xaa in position 56 is any amino acid
  Variant (57)..(57): Xaa in position 57 is any or no amino acid
  Variant (61)..(61): Xaa in position 61 is any amino acid
  Variant (68)..(68): Xaa in position 68 is any amino acid
  Variant (71)..(71): Xaa in position 71 is any amino acid
  Variant (73)..(75): Xaa in position 73 to 75 is any amino acid
  Variant (77)..(77): Xaa in position 77 is any amino acid
  Variant (79)..(80): Xaa in position 79 to 80 is any amino acid
  Variant (82)..(82): Xaa in position 82 is any amino acid
  Variant (84)..(84): Xaa in position 84 is any amino acid
  Variant (86)..(87): Xaa in position 86 to 87 is any amino acid
  Variant (90)..(93): Xaa in position 90 to 93 is any amino acid
  Variant (94)..(97): Xaa in position 94 to 97 is any or no amino acid
  Variant (107)..(107): Xaa in position 107 is any amino acid
  Variant (109)..(109): Xaa in position 109 is any amino acid
  Variant (111)..(111): Xaa in position 111 is any amino acid
  Variant (114)..(114): Xaa in position 114 is any amino acid
  Variant (116)..(116): Xaa in position 116 is any amino acid
  Variant (118)..(119): Xaa in position 118 to 119 is any amino acid
  Variant (124)..(126): Xaa in position 124 to 126 is any amino acid
  Variant (129)..(129): Xaa in position 129 is any amino acid
  Variant (131)..(131): Xaa in position 131 is any amino acid
  Variant (134)..(134): Xaa in position 134 is any amino acid
  Variant (136)..(136): Xaa in position 136 is any amino acid
  Variant (144)..(145): Xaa in position 144 to 145 is any amino acid
  Variant (147)..(152): Xaa in position 147 to 152 is any amino acid
  Variant (153)..(155): Xaa in position 153 to 155 is any or no amino acid
  Variant (157)..(157): Xaa in position 157 is any amino acid
  Variant (159)..(160): Xaa in position 159 to 160 is any amino acid
  Variant (162)..(167): Xaa in position 162 to 167 is any amino acid
  Variant (171)..(171): Xaa in position 171 is any amino acid
  Variant (176)..(176): Xaa in position 176 is any amino acid
  Variant (183)..(183): Xaa in position 183 is any amino acid
  Variant (187)..(189): Xaa in position 187 to 189 is any amino acid
  Variant (191)..(200): Xaa in position 191 to 200 is any amino acid
  Variant (201)..(215): Xaa in position 201 to 215 is any or no amino acid
  Variant (217)..(219): Xaa in position 217 to 219 is any amino acid
  Variant (221)..(222): Xaa in position 221 to 222 is any amino acid
  Variant (223)..(223): Xaa in position 223 is any or no amino acid
  Variant (225)..(231): Xaa in position 225 to 231 is any amino acid
  Variant (233)..(234): Xaa in position 233 to 234 is any amino acid
  Variant (236)..(239): Xaa in position 236 to 239 is any amino acid
MXSXXXXXXXXXXXXVRHXSHNHPLRXXKXXXEXEXXCSGCXLXLXGXAFKCXKSXXCDYXLHKSCFXLPXEXXXKXHXXHXLXLXXSPXXXXXXXXCDACGEYGSXFXYXCSXCXYXXHVGCXXXPEXVXREXHXHPLTLLYXXPXXXXXXXXXFXCXXCXXXXXXNLWXYYCKXCDYGTHXHSCXXXEXXXXXXXXXXXXXXXXXXXXXXXXXGXXXSXXXSXXXXXXXAXXEXXXXQ

SEQ ID NO: 1412 - protein, 49 aa, Artificial sequence
  protein pattern
  Variant (2)..(2): Xaa in position 2 is any amino acid
  Variant (10)..(10): Xaa in position 10 is Ala, Gly or Ser
  Variant (12)..(12): Xaa in position 12 is Ser or Thr
  Variant (14)..(14): Xaa in position 14 is any amino acid
  Variant (17)..(17): Xaa in position 17 is any amino acid
  Variant (19)..(19): Xaa in position 19 is any amino acid
  Variant (21)..(21): Xaa in position 21 is Asp or His
  Variant (22)..(22): Xaa in position 22 is Leu or Val
  Variant (27)..(27): Xaa in position 27 is Ala or Val
  Variant (28)..(28): Xaa in position 28 is any amino acid
  Variant (29)..(29): Xaa in position 29 is Ile, Met or Val
  Variant (32)..(32): Xaa in position 32 is Asn, Ser or Thr
  Variant (33)..(33): Xaa in position 33 is Met or Val
  Variant (34)..(34): Xaa in position 34 is Glu or Lys
  Variant (35)..(35): Xaa in position 35 is His or Arg
  Variant (36)..(36): Xaa in position 36 is Asp or Glu
  Variant (37)..(37): Xaa in position 37 is Asp, Glu or Gly
  Variant (39)..(39): Xaa in position 39 is any amino acid
  Variant (43)..(43): Xaa in position 43 is Ala or Thr
  Variant (45)..(45): Xaa in position 45 is Ile or Leu
  Variant (47)..(47): Xaa in position 47 is any amino acid
  Variant (48)..(48): Xaa in position 48 is Ala, Ser or Thr
CXACGEYGSXFXYXCSXCXYXXHVGCXXXPEXXXXXXHXHPLXLXYXXP

SEQ ID NO: 1413 - protein, 38 aa, Artificial sequence
  protein pattern
  Variant (4)..(4): Xaa in position 4 is Ala or Pro
  Variant (12)..(12): Xaa in position 12 is Gly, Ser or Val
  Variant (13)..(13): Xaa in position 13 is Phe or His
  Variant (15)..(15): Xaa in position 15 is Ala or Cys
  Variant (16)..(17): Xaa in position 16 to 17 is any amino acid
  Variant (18)..(18): Xaa in position 18 is Glu or Lys
  Variant (19)..(19): Xaa in position 19 is Asp or Glu
  Variant (21)..(21): Xaa in position 21 is any amino acid
  Variant (22)..(22): Xaa in position 22 is Ala, Ile or Val
  Variant (27)..(27): Xaa in position 27 is Asp, Glu or Ser
  Variant (29)..(29): Xaa in position 29 is Asp or Glu
  Variant (31)..(31): Xaa in position 31 is any amino acid
  Variant (33)..(33): Xaa in position 33 is any or no amino acid
  Variant (35)..(35): Xaa in position 35 is any or no amino acid
VRHXSHNHPLRXXKXXXXXEXXCSGCXLXLXGXAXFKC

SEQ ID NO: 1414 - protein, 41 aa, Artificial sequence
  protein pattern
  Variant (2)..(2): Xaa in position 2 is Asp, Asn or Ser
  Variant (3)..(3): Xaa in position 3 is any amino acid
  Variant (5)..(7): Xaa in position 5 to 7 is any amino acid
  Variant (8)..(8): Xaa in position 8 is Ile, Met or Val
  Variant (9)..(9): Xaa in position 9 is Pro or Ser
  Variant (10)..(10): Xaa in position 10 is Asp or Glu
  Variant (11)..(11): Xaa in position 11 is Asp or Asn
  Variant (14)..(14): Xaa in position 14 is any amino acid
  Variant (19)..(19): Xaa in position 19 is Asp, Glu or Lys
  Variant (23)..(23): Xaa in position 23 is Ala or Gly
  Variant (26)..(26): Xaa in position 26 is Leu or Val
  Variant (30)..(31): Xaa in position 30 to 31 is any amino acid
  Variant (32)..(32): Xaa in position 32 is any or no amino acid
  Variant (34)..(34): Xaa in position 34 is Asp or Glu
  Variant (35)..(40): Xaa in position 35 to 40 is any amino acid
  Variant (41)..(41): Xaa in position 41 is Asp, Glu, Gly or Gln
CXXCXXXXXXXLWXYYCKXCDYXTHXHSCXXXEXXXXXXXX

SEQ ID NO: 1415 - protein, 20 aa, Artificial sequence
  protein pattern
  Variant (2)..(5): Xaa in position 2 to 5 is any amino acid
  Variant (6)..(6): Xaa in position 6 is any or no amino acid
  Variant (8)..(8): Xaa in position 8 is any amino acid
  Variant (9)..(9): Xaa in position 9 is any or no amino acid
  Variant (11)..(11): Xaa in position 11 is Glu or Gln
  Variant (12)..(12): Xaa in position 12 is Asp or Arg
  Variant (14)..(14): Xaa in position 14 is Leu, Met or Val
  Variant (15)..(15): Xaa in position 15 is Ala or Glu
  Variant (16)..(16): Xaa in position 16 is any amino acid
  Variant (17)..(17): Xaa in position 17 is Leu, Met or Val
  Variant (19)..(19): Xaa in position 19 is Ile or Leu
  Variant (20)..(20): Xaa in position 20 is Ala or Glu
SXXXXXMXXAXXEXXXXQXX

SEQ ID NO: 1416 - protein, 16 aa, Artificial sequence
  protein pattern
  Variant (6)..(6): Xaa in position 6 is Asp or Glu
  Variant (9)..(9): Xaa in position 9 is any amino acid
  Variant (11)..(13): Xaa in position 11 to 13 is any amino acid
  Variant (15)..(15): Xaa in position 15 is Ala or Ser
HKSCFXLPXEXXXKXH

SEQ ID NO: 1417 - protein, 9 aa, Artificial sequence
  protein pattern
  Variant (2)..(2): Xaa in position 2 is Pro, Ser or Thr
  Variant (4)..(4): Xaa in position 4 is any amino acid
  Variant (6)..(6): Xaa in position 6 is Ile or Leu
  Variant (7)..(7): Xaa in position 7 is His or Tyr
HXLXLXXSP

SEQ ID NO: 1418 - DNA, 579 bp, Arabidopsis thaliana
  CDS (1)..(579)
atgatagatttcagtcgaatccagaaagagcttcaggactgcgagagaaaccaggattcttcgggtatccgggtctgccccaaatccgataacctcacccgactcaccggaaccattcctggtccaatcggtactccttacgaaggcggtacatttcagatcgatatcactatgccagatgggtatccatttgagcctccaaagatgcagttttcaactaaagtttggcatccgaatattagtagccaaagcggtgcaatatgcttggatatcttgaaagaccagtggagtccagctcttactctgaagacagctcttgtttcaattcaggctttactctctgcacctgagcccaaagaccctcaagatgctgttgtagctgaacagtacatgaagaactatcaagtgtttgtatcaacagctcgttactggactgaaactttcgccaagaaatcttctctagaggaaaaagtcaagagacttgtggagatgggttttggagacgctcaagttaggagtgcaattgaatcaagtggtggtgatgagaatctggctctggaaaagctctgttctgcttag

SEQ ID NO: 1419 - protein, 192 aa, Arabidopsis thaliana
MIDFSRIQKELQDCERNQDSSGIRVCPKSDNLTRLTGTIPGPIGTPYEGGTFQIDITMPDGYPFEPPKMQFSTKVWHPNISSQSGAICLDILKDQWSPALTLKTALVSIQALLSAPEPKDPQDAVVAEQYMKNYQVFVSTARYWTETFAKKSSLEEKVKRLVEMGFGDAQVRSAIESSGGDENLALEKLCSA

SEQ ID NO: 1420 - DNA, 1067 bp, Glycine max
  CDS (270)..(848)
tcgtacggctgcgagaagacgacagaagggggcattattttattgcactcattcaccgcagatgtctgataaggaccgaaagaaaattaaaacggcgtttcgataactgccacataaaagtacatataaaatcagaaaaagaaaactaacatacatcagtcactagtgtgtgaaaagcgacacaacacaacataagctttattctttgttgttctccccgtctgtgcagcactgttttagggtttggtcaattggtgacaagattgaagatgatagaccttgcgcgcgtgcagaaggagcttgtggaatgcagcaaggacgcggagggatcgggcatcaaagtcagccccaaaaacgacaaccttgttctcttgatcggcaccattcctggccccgtcggaactccatatgaagggggcattttccagattgatatcacattgcctgatgggtacccgtttgaaccccccaagatgcagtttaaaaccaaagtttggcaccctaatatcagcagccaaagtggagctatttgcctggatatcttgaaggaccagtggagcccagcactcactctgaagactgcacttctttctgtgcaagcacttctctctgctcctcagcctgatgatcctcaagatgccgtggtggcacagcagtatctgaaagactatcagacatttgttaacactgctcgctactggacagaaagttttgccaaggcttcgtctcgtgggattgaagataaggtacagaaactcgttgagatgggatttccagaagctcgagtaaggagcattttggaagctgttggtggtgatgaaaacatggcccttgaaaggttgctgtagatcatggtcaagtttaggaagacgtgtctccataatatgatggaaccatatagacaataggttttaaattgaatagagtcatataaatctacttggaatatcgtatagtccttttgttttacttttctcctccttggaaactacagttctcgactatttcctgattattatatatatcagctatgaaattaaataccttgttggcaaggtttctgcttc

SEQ ID NO: 1421 - protein, 192 aa, Glycine max
MIDLARVQKELVECSKDAEGSGIKVSPKNDNLVLLIGTIPGPVGTPYEGGIFQIDITLPDGYPFEPPKMQFKTKVWHPNISSQSGAICLDILKDQWSPALTLKTALLSVQALLSAPQPDDPQDAVVAQQYLKDYQTFVNTARYWTESFAKASSRGIEDKVQKLVEMGFPEARVRSILEAVGGDENMALERLL

SEQ ID NO: 1422 - DNA, 1082 bp, Sorghum bicolor
  CDS (132)..(719)
gccggccgggctgcggcagcagtcccacccccaccctcctcgtcctcgcatcccaccccatcgcgccgctcccgacgagagccaggaggaggtggcggcggcgccgcgaggaaggaagggatcgatcgaggatggtggacgtctcgcgcgtgcagaaggagctcaccgagtgcaaccgcgaccgggaggtgtcgggcgtctccatcgcgctccacgacggcgccaacatctcccacctcaccggcaccatcgccgggcccgctgacagcccctacgagggcggcaccttcgtcatcgacatccgcctccccggtggatatccctttgagcctccgaagatgcagtttgtcaccaaagtatggcatcctaacatcagcagccaaaatggagcaatttgcttggatattctgaaagatcagtggagcccagcccttaccttgaagacggcactcctttcccttcaagctctgctttcttctcctgcacctgatgatcctcaggatgctgttgttgcacaacagtacctgcgtgactatccaacatttgctgctacggctcgctactggacagaggccttcgcaaagagtgcgtcaactggcatggaagagaaggtgcagaagctggttgagatgggcttcccagaggacctggtgagaagtaccctgaagagtgtggatggcgatgagaacatggctcttgaaaagctctgctctgggtgaaccatctggccagtacatgagctgtaaattgcatccccattgattatataatataagaacacaatgcctgctaatgctcctgctcagccatttcagtgtggccattttattaagacaatatatataggggaggtcgtgccatggcccatgggactcgagtgaaattcgacttcttcagagttcgttcgctttgtttgcttttttttttctcaacttttgcttttgtgtctggtagcctgaatcatcaactctttgcccatggaactctggtaatatctgatgcaaaagaaacatcagattgacataaaccccttgcaacctggatgtgatggcctgatggataacatctcatatttgattctc

SEQ ID NO: 1423 - protein, 195 aa, Sorghum bicolor
MVDVSRVQKELTECNRDREVSGVSIALHDGANISHLTGTIAGPADSPYEGGTFVIDIRLPGGYPFEPPKMQFVTKVWHPNISSQNGAICLDILKDQWSPALTLKTALLSLQALLSSPAPDDPQDAVVAQQYLRDYPTFAATARYWTEAFAKSASTGMEEKVQKLVEMGFPEDLVRSTLKSVDGDENMALEKLCSG

SEQ ID NO: 1424 - DNA, 1043 bp, Zea mays
  CDS (175)..(768)
  misc_feature (1033)..(1033): n is a, g, c or t
  misc_feature (1034)..(1034): n is a, g, c or t
  misc_feature (1035)..(1035): n is a, g, c or t
  misc_feature (1036)..(1036): n is a, g, c or t
gggtacctcgaagccggccgggattaaggacagggcagctcgaggccgggcgcgagtgagagggaagtaactgccgcatctcaagtctcaaccctcgcctccaatcgcaacgctcccgaggagagccaggaggaggtgacggcggcgccgcgaggaaggagggatcgatcgaggatggtggacgtctcgcgcgtgcagaaggagctcaccgagtgcaaccgcgaccgggaggtatcgggcgtctccatcgcgctccacgacggcgccaacatctcccacctcaccggcaccatcgccgggcccgccgacagcccctacgagggcggcacgttcgtcatcgatatccgcctgcccggtggatatccctttgagcctccgaagatgcagttcatcaccaaagtatggcaccctaacatcagcagccaaaatggagcaatttgcttggacattctgaaagatcagtggagcccagcccttaccttgaagactgcgctcctttcccttcaagctctgctttcttctcctgcacctgatgatcctcaggatgctgttgttgcccaacagtacctgcgtgactatccaacatttgccgctacggctcgctactggacagaggcctttgcgaagagtgcatcaacgggcatggaagagaaggtgcagaagctggttgagatgggcttcccagaggatcaggtgagaagtgccctgaagagcgtggatggcgacgagaacatggctctcgaaaagctctgctctggctctgggtgaaccattgtcttggggccaatacatgagcagctgtacatttcacagtgcctgctaatgctcctgctcagccatttcatataggggccgtgccatggcccatgggactggagtgagactctcctaggacaacattcgtttctttaaactcttttgctgttgtgtctggtaggctgaatcgactcttggaccatggaaccctggtaatatctgatgcaaaggaaacatgaggttgacataaaaaaaaaaaaaaaaaaaaaaactcgannnncttctag

SEQ ID NO: 1425 - protein, 197 aa, Zea mays
MVDVSRVQKELTECNRDREVSGVSIALHDGANISHLTGTIAGPADSPYEGGTFVIDIRLPGGYPFEPPKMQFITKVWHPNISSQNGAICLDILKDQWSPALTLKTALLSLQALLSSPAPDDPQDAVVAQQYLRDYPTFAATARYWTEAFAKSASTGMEEKVQKLVEMGFPEDQVRSALKSVDGDENMALEKLCSGSG

SEQ ID NO: 1426 - DNA, 588 bp, Oryza sativa (japonica cultivar-group)
  CDS (1)..(588)
atggtggacgtgtcgagggtgcagaaggagctgacggagtgcaaccgggacagggaggtctccggggtgtccatcgcgctccacgacggctccaccatctcccacctcaccggcaccatcgccgggccccaaggcacgccctacgagggcggcaccttcgtcatcgacatccgcctcccaggtggttacccctttgagcctcctaagatgcagtttatcaccaaagtatggcaccctaacattagcagccaaaacggagcaatctgcttggacatactgaaggaccaatggagcccagcccttacattgaagacggcactgctttccctccaagctctgctttctgcccctgcacctgatgatcctcaggatgctgtcgttgcacaacagtacttgcgtgactattccacattttctgctactgctcgctactggacggaggcctttgcaaagaattcctccaccggcatggaagaaaaggtgcagaagctggttgagatgggcttccctgaagacatggtgagaagtgttctgaagagtgtcaatggcgacgagaacatggctcttgagaagctctgctctggctga

SEQ ID NO: 1427 - protein, 195 aa, Oryza sativa (japonica cultivar-group)
MVDVSRVQKELTECNRDREVSGVSIALHDGSTISHLTGTIAGPQGTPYEGGTFVIDIRLPGGYPFEPPKMQFITKVWHPNISSQNGAICLDILKDQWSPALTLKTALLSLQALLSAPAPDDPQDAVVAQQYLRDYSTFSATARYWTEAFAKNSSTGMEEKVQKLVEMGFPEDMVRSVLKSVNGDENMALEKLCSG

SEQ ID NO: 1428 - DNA, 585 bp, Solanum tuberosum
  CDS (1)..(585)
atggtggacttgactagggttcaaaaggagctccatgaatgcaacagagatgttcaggtttctggaattaatgttacccttaaaggtgacagtctcactcacttgattggtacaatccctggtcctgttggtactccttatgaaggcggtactttcaagatcgatatcactcttactgatggttacccatttgagcctccaaaaatgaaattcgccacaaaagtttggcatcccaacataagtagtcaaagtggagcaatatgcctagacatcctgaaggaccagtggagcccagcgctaactctcaagacagctctcctttctatacaagcattactttctgctcctgaacctgatgatccacaagatgcagttgttgcacaacagtatcttagagaccatcagacctttgtcggcacagctcgttactggactgaaacttttgctaaaacatccacacttgctgcagatgagaagatacaaaagcttgtggaaatgggctttcctgaagctcaagttaggagtactttggaagcaaatggttgggatgaaaacatggctcttgaaaagctgttgtccagctag

SEQ ID NO: 1429 - protein, 194 aa, Solanum tuberosum
MVDLTRVQKELHECNRDVQVSGINVTLKGDSLTHLIGTIPGPVGTPYEGGTFKIDITLTDGYPFEPPKMKFATKVWHPNISSQSGAICLDILKDQWSPALTLKTALLSIQALLSAPEPDDPQDAVVAQQYLRDHQTFVGTARYWTETFAKTSTLAADEKIQKLVEMGFPEAQVRSTLEANGWDENMALEKLLSS

SEQ ID NO: 1430 - DNA, 923 bp, Lycopersicon esculentum
  CDS (60)..(644)
gcacgagggcgacttttgcataaaccaaaattagaatcaaattggaagagagaaaaaaaatggtggacttggctagggttcaaaaggagctccatgaatgcaacagagatgttcaggtttctggaattaatgttacccttaaaggtgacagtctcactcacttgattggtacaatccctggtcctgttggtactccttacgaaggcggtactttcaagatcgatatcactcttactgatggctacccatttgagcctccaaaaatgaaattcgccacaaaagtttggcatcccaacataagtagtcaaagtggagcaatatgcctagacatcctgaaggaccagtggagcccagcactaactctcaagacagctctcctttctatacaagcattactttctgctcctgaacctgatgatccacaagatgcagttgttgcacagcagtatcttagagaacatcagacctttgtcggcacagctcgttactggactgagacttttgcaaaaacatccacacttgctgcagacgacaagatacaaaagcttgtggaaatgggctttcctgaagctcaagtgaggagtactttggaagcaaatggttgggatgaaaacatggctcttgaaaagctgttgtccagctaaaacccttctactgcaactcatattttgataagacaattatatccttccagcaaaagctgatgactagaatagagtcactcggttatactgttgcttggcaatcttgtttctgtctcctttatggtttgctgttgacatctcttcatatcctgtgaagattctgatgttatttttacaatatcaagcaaattgcatatgaatcatggggaggaagtggactttccggggtgaaaaaaaaaaaaaaaaaaaaaaaaaaaaaaaaaaaaaaaaaaaaaaaaa

SEQ ID NO: 1431 - protein, 194 aa, Lycopersicon esculentum
MVDLARVQKELHECNRDVQVSGINVTLKGDSLTHLIGTIPGPVGTPYEGGTFKIDITLTDGYPFEPPKMKFATKVWHPNISSQSGAICLDILKDQWSPALTLKTALLSIQALLSAPEPDDPQDAVVAQQYLREHQTFVGTARYWTETFAKTSTLAADDKIQKLVEMGFPEAQVRSTLEANGWDENMALEKLLSS

SEQ ID NO: 1432 - DNA, 579 bp, Brassica napus
  CDS (1)..(579)
atgatagatatcagtcgagtccagaaagagctccaagattgcgagaaagacagagactcctcgggcatccgggtctgcccgaaatccgataacctcacccgactcaccggaaccatcccgggtccaatcggaactccttacgaaggcggaacctttcagatcgatatcaccattccagaagggtatccctttgagcctccaaagatgcaattttcaaccaaagtttggcacccgaacataagtagccaaagcggggcaatatgcttggatgtcttgaaagaccagtggagtccagctcttactttgaagacagctcttgtttcagtccaggcattactctctgcaccagagcctaaagaccctcaagatgctgttgttgctgaacagtacatgaagaactatcaagtgtttgtatcaacagctcgttactggacccaaacattcgccaagaactcttctcttgaggataaagtgaagagactcgtcgagatgggttttggagatgctcaggctaggagtgcaattgaatcaagtggtggagatgagaatgtggcgcttgaaaagctctgttctggttag

SEQ ID NO: 1433 - protein, 192 aa, Brassica napus
MIDISRVQKELQDCEKDRDSSGIRVCPKSDNLTRLTGTIPGPIGTPYEGGTFQIDITIPEGYPFEPPKMQFSTKVWHPNISSQSGAICLDVLKDQWSPALTLKTALVSVQALLSAPEPKDPQDAVVAEQYMKNYQVFVSTARYWTQTFAKNSSLEDKVKRLVEMGFGDAQARSAIESSGGDENVALEKLCSG

SEQ ID NO: 1434 - DNA, 579 bp, Brassica napus
  CDS (1)..(579)
atgatagatatcagtcgagtccagaaagagctccaagattgcgagaaagacagagactcctcgggcatccgggtctgcccgaaatccgataacctcacccgactcaccggaaccatcccgggtccaatcggaactccttacgaaggcggaacctttcagatcgatatcaccattccagaagggtatccctttgagcctccaaagatgcaattttcaaccaaagtttggcacccgaacataagtagccaaagcggggcaatatgcttggatgtcttgaaagaccagtggagtccagctcttactttgaagacagctcttgtttcagtccaggcattactctctgcaccagagcctaaagaccctcaagatgctgttgttgctgaacagtacatgaagaactatcaagtgtttgtatcaacagctcgttactggacccaaacattcgccaagaactcttctcttgaggataaagtgaagagactcgtggagatgggttttggagatgctcaggttaggagtgcaattgaatcaagtggtggagatgagaatgtggcgcttgaaaagctctgttctggttag

SEQ ID NO: 1435 - protein, 192 aa, Brassica napus
MIDISRVQKELQDCEKDRDSSGIRVCPKSDNLTRLTGTIPGPIGTPYEGGTFQIDITIPEGYPFEPPKMQFSTKVWHPNISSQSGAICLDVLKDQWSPALTLKTALVSVQALLSAPEPKDPQDAVVAEQYMKNYQVFVSTARYWTQTFAKNSSLEDKVKRLVEMGFGDAQVRSAIESSGGDENVALEKLCSG

SEQ ID NO: 1436 - DNA, 579 bp, Glycine max
  CDS (1)..(579)
atgatagaccttgcgcgcgtgcagaaggagctcgtggaatgcagcaaggacgcggagggatcgggcatcaaagtctgccccaaaagcgacaaccttgttctcttgatcggcaccattcctggccctgtcggaactccttatgaagggggcattttccagattgatatcacattgccagatgggtacccgtttgaaccccccaagatgaagtttaaaaccaaagtttggcatcctaatatcagcagccaaagtggagctatttgcctggatatcttgaaggaccagtggagcccagcactcactctgaagactgcacttctttctgtgcaagcacttctctctgctccacagcctgatgatcctcaagatgccgtggtggcacagcagtatctgaaagactatcagacatttgttaacactgctcgctactggacagaaagttttgccaaggaatcgtctcgcgggattgaagacaaggtacagaaactcgttgagatgggatttccagaagctcaagtaaggagcattttggaagctgttggtggtgatgaaaacttggctcttgaaaggttgctgtag

SEQ ID NO: 1437 - protein, 192 aa, Glycine max
MIDLARVQKELVECSKDAEGSGIKVCPKSDNLVLLIGTIPGPVGTPYEGGIFQIDITLPDGYPFEPPKMKFKTKVWHPNISSQSGAICLDILKDQWSPALTLKTALLSVQALLSAPQPDDPQDAVVAQQYLKDYQTFVNTARYWTESFAKESSRGIEDKVQKLVEMGFPEAQVRSILEAVGGDENLALERLL

SEQ ID NO: 1438 - DNA, 579 bp, Glycine max
  CDS (1)..(579)
atgatagaccttgcgcgcgtgcagaaggagctcgtggaatgcagcaaggacgcggagggatcgggcatcaaagtctgccccaaaagcgacaaccttgttctcttgatcggcaccattcctggccctgtcggaactccttatgaagggggcattttccagattgatatcacattgccagatgggtacccgtttgaaccccccaagatgaagtttaaaaccaaagtttggcatcctaatatcagcagccaaagtggagctatttgcctggatatcttgaaggaccagtggagcccagcactcactctgaagactgcacttctttctgtgcaagcacttctctctgctccacagcctgatgatcctcaagatgccgtggtggcacagcagtatctgaaagactatcagacatttgttaacactgctcgctactggacagaaagttttgccaaggcttcgtctcgtgggattgaagataaggtacagaaactcgttgagatgggatttccagaagctcgagtaaggagcattttggaagctgttggtggtgatgaaaacatggcccttgaaaggttgctgtag

SEQ ID NO: 1439 - protein, 192 aa, Glycine max
MIDLARVQKELVECSKDAEGSGIKVCPKSDNLVLLIGTIPGPVGTPYEGGIFQIDITLPDGYPFEPPKMKFKTKVWHPNISSQSGAICLDILKDQWSPALTLKTALLSVQALLSAPQPDDPQDAVVAQQYLKDYQTFVNTARYWTESFAKASSRGIEDKVQKLVEMGFPEARVRSILEAVGGDENMALERLL

SEQ ID NO: 1440 - DNA, 585 bp, Helianthus annuus
  CDS (1)..(585)
atggccgatgcaacgaggatccaaagggaactgacgcatttcaacaaagatcaaagcatagtaggcatgactttaactcccgacgagaacgacattcgccacctcaccgccaccatccccggccctctttccactccctacgaaggcggattattcggtgtcgatattactttaccagatgggtatccttttgtgcctcctaaaatgaagttcactacaaaagtttggcatccaaatatcagtagccaaactggagctatatgtcttgatatcctaaagaacaactggagtccagctctaaacctgaaaaccgctctgatttccttacaagctctgttatcaaccccggaaccaaacgatccccaagatgctgttgttgccaaacagtatcttagcgataatgctacatatgttgctacagctcggcgttggacagaggactttgccaaggcttcatccagtgggttcagtgggaaggtgcagaagctggttgaaatggggttccctgaagggttggtaaaaaagacgctggaagcttttggcggtgatgaaaacatggcacttgaacggttgtgtcggaaatag

SEQ ID NO: 1441 - protein, 194 aa, Helianthus annuus
MADATRIQRELTHFNKDQSIVGMTLTPDENDIRHLTATIPGPLSTPYEGGLFGVDITLPDGYPFVPPKMKFTTKVWHPNISSQTGAICLDILKNNWSPALNLKTALISLQALLSTPEPNDPQDAVVAKQYLSDNATYVATARRWTEDFAKASSSGFSGKVQKLVEMGFPEGLVKKTLEAFGGDENMALERLCRK

SEQ ID NO: 1442 - DNA, 594 bp, Zea mays
  CDS (1)..(594)
atggtggacgtctcgcgcgtgcagaaggagctcaccgagtgcaaccgcgaccgggaggtatcgggcgtctccatcgcgctccacgacggcgccaacatctcccacctcaccggcaccatcgccgggcccgccgacagcccctacgagggcggcacgttcgtcatcgatatccgcctgcccggtggatatccctttgagcctccgaagatgcagttcatcaccaaagtatggcaccctaacatcagcagccaaaatggagcaatttgcttggacattctgaaagatcagtggagcccagcccttaccttgaagactgcgctcctttcccttcaagctctgctttcttctcctgcacctgatgatcctcaggatgctgttgttgcacaacagtacctgcgtgactatccaacatttgccgctacggctcgctactggacagaggccttcgcgaagagtgcatcaacgggcatggaagagaaggtgcagaagctggttgagatgggcttcccagaggatcaggtgagaagtgccctgaagagcgtggatggcgacgagaacatggctctcgaaaagctctgctctggctctgggtga

SEQ ID NO: 1443 - protein, 197 aa, Zea mays; identical to SEQ ID NO: 1425

SEQ ID NO: 1444 - DNA, 591 bp, Triticum aestivum
  CDS (1)..(591)
atggtggacgtgtcgcgcgtgcagaaggagctgacggagtgcaaccgggactcggacatctccggcgtctccatcgcgctccacgacgggggctccagcatcacccacctcaccggcaccatcgccgggccccgcgacagcccctacgagggcggcaccttccgcatcgacatccgcctgccaggtggctatccctttgagcctcctaagatgcagttcatcaccaaagtatggcacccgaatattagcagccaaaatggagcaatttgcttggacatactgaaagatcagtggagcccagcccttaccttgaagacagcattgctatcccttcaagctcttctttctgctcctgcccctgatgatcctcaggatgctgttgttgcacaacagtatctgcgtgacaaggccacatttgtcagtactgctcgctattggaccgaggcatttgcaaagagcgactccaccggcatggaagaaaaggtgcagaagctggtcgagatgggcttccccgaggatatggtgagaagcgccctgatgagtgtgaacggcgacgagaacatggctctcgagaagctctgctctggctga

SEQ ID NO: 1445 - protein, 196 aa, Triticum aestivum
MVDVSRVQKELTECNRDSDISGVSIALHDGGSSITHLTGTIAGPRDSPYEGGTFRIDIRLPGGYPFEPPKMQFITKVWHPNISSQNGAICLDILKDQWSPALTLKTALLSLQALLSAPAPDDPQDAVVAQQYLRDKATFVSTARYWTEAFAKSDSTGMEEKVQKLVEMGFPEDMVRSALMSVNGDENMALEKLCSG

SEQ ID NO: 1446 - DNA, 582 bp, Glycine max
  CDS (1)..(582)
atgatagaccttgcgcgcgtgcagaaggagctcgtggaatgcagcaaggacgcggagggatcgggcatcaaagtctgccccaaaagcgacaaccttgttctcttgatcggcaccattcctggccctgtcggaactccttatgaagggggcattttccagattgatatcacattgccagatgggtacccgtttgaaccccccaagatgaagtttaaaaccaaagtttggcatcctaatatcagcagccaaagtggagctatttgcctggatatcttgaaggaccagtggagcccagcactcactctgaagactgcacttctttctgtgcaagcacttctctctgctccacagcctgatgatcctcaagtgtccgtggtggcacagcagttatctgaaagactatcagacatttgtttaacactgctcgctactggacagaaagttttgccaaggcttcgtctcgtgagtattgaagataaggtagagaaactcgttgcgatgggatttccagacgctctagtaagtagcatactagaagctgttagtggtcatgaaaagcttcactccaaaaagttgctgtag

SEQ ID NO: 1447 - protein, 193 aa, Glycine max
MIDLARVQKELVECSKDAEGSGIKVCPKSDNLVLLIGTIPGPVGTPYEGGIFQIDITLPDGYPFEPPKMKFKTKVWHPNISSQSGAICLDILKDQWSPALTLKTALLSVQALLSAPQPDDPQVSVVAQQLSERLSDICLTLLATGQKVLPRLRLVSIEDKVEKLVAMGFPDALVSSILEAVSGHEKLHSKKLL

SEQ ID NO: 1448 - DNA, 594 bp, Zea mays
  CDS (1)..(594)
atggtggacgtctcgcgcgtgcagaaggagctcaccgagtgcaaccgcgaccgggaggtatcgggcgtctccatcgcgctccacgacggcgccaacatctcccacctcaccggcaccatcgccgggcccgccgacagcccctacgagggcggcacgttcgtcatcgatatccgcctgcccggtggatatccctttgagccgccgaagatgcagttcatcaccaaagtatggcaccctaacatcagcagccaaaatggagcaatttgcttggacattctgaaagatcagtggagcccagcccttaccttgaagactgcgctcctttcccttcaagctctgctttcttctcctgcacctgatgatcctcaggatgctgttgttgcacaacagtacctgcgtgactatccaacatttgccgctacggctcgctactggacagaggccttcgcgaagagtgcatcaacgggcatggaagagaaggtgcagaagctggttgagatgggcttcccagaggatcaggtgagaagtgccctgaagagcgtggatggcgacgagaacatggctctcgaaaagctctgctctggctctgggtga

SEQ ID NO: 1449 - protein, 197 aa, Zea mays; identical to SEQ ID NO: 1425

SEQ ID NO: 1450 - DNA, 28 bp, Artificial sequence
  primer
atagagctcccaggattcttcgggtatc

SEQ ID NO: 1451 - DNA, 30 bp, Artificial sequence
  primer
atacccgggtcaggtgcagagagtaaagcc

SEQ ID NO: 1452 - DNA, 24 bp, Artificial sequence
  primer
atgatagatttcagtcgaatccag

SEQ ID NO: 1453 - DNA, 22 bp, Artificial sequence
  primer
ctaagcagaacagagcttttcc

SEQ ID NO: 1454 - DNA, 28 bp, Artificial sequence
  primer
ataccatggccaggattcttcgggtatc

SEQ ID NO: 1455 - DNA, 32 bp, Artificial sequence
  primer
atattaattaatcaggtgcagagagtaaagcc

SEQ ID NO: 1456 - DNA, 28 bp, Artificial sequence
  primer
ataggtaccccaggattcttcgggtatc

SEQ ID NO: 1457 - DNA, 30 bp, Artificial sequence
  primer
atagtcgactcaggtgcagagagtaaagcc

SEQ ID NO: 1458 - protein, 194 aa, Artificial sequence
  consensus sequence
  Variant (2)..(2): Xaa in position 2 is any amino acid
  Variant (4)..(5): Xaa in position 4 to 5 is any amino acid
  Variant (12)..(13): Xaa in position 12 to 13 is any amino acid
  Variant (15)..(16): Xaa in position 15 to 16 is any amino acid
  Variant (18)..(20): Xaa in position 18 to 20 is any amino acid
  Variant (23)..(34): Xaa in position 23 to 34 is any amino acid
  Variant (35)..(36): Xaa in position 35 to 36 is any or no amino acid
  Variant (38)..(38): Xaa in position 38 is any amino acid
  Variant (42)..(42): Xaa in position 42 is any amino acid
  Variant (45)..(47): Xaa in position 45 to 47 is any amino acid
  Variant (53)..(53): Xaa in position 53 is any amino acid
  Variant (55)..(55): Xaa in position 55 is any amino acid
  Variant (59)..(59): Xaa in position 59 is any amino acid
  Variant (62)..(62): Xaa in position 62 is any amino acid
  Variant (72)..(72): Xaa in position 72 is any amino acid
  Variant (74)..(74): Xaa in position 74 is any amino acid
  Variant (86)..(86): Xaa in position 86 is any amino acid
  Variant (109)..(109): Xaa in position 109 is any amino acid
  Variant (111)..(111): Xaa in position 111 is any amino acid
  Variant (117)..(117): Xaa in position 117 is any amino acid
  Variant (119)..(119): Xaa in position 119 is any amino acid
  Variant (121)..(121): Xaa in position 121 is any amino acid
  Variant (130)..(130): Xaa in position 130 is any amino acid
  Variant (133)..(138): Xaa in position 133 to 138 is any amino acid
  Variant (140)..(141): Xaa in position 140 to 141 is any amino acid
  Variant (145)..(145): Xaa in position 145 is any amino acid
  Variant (150)..(150): Xaa in position 150 is any amino acid
  Variant (154)..(155): Xaa in position 154 to 155 is any amino acid
  Variant (157)..(157): Xaa in position 157 is any amino acid
  Variant (158)..(159): Xaa in position 158 to 159 is any or no amino acid
  Variant (161)..(161): Xaa in position 161 is any amino acid
  Variant (164)..(164): Xaa in position 164 is any amino acid
  Variant (173)..(175): Xaa in position 173 to 175 is any amino acid
  Variant (179)..(179): Xaa in position 179 is any amino acid
  Variant (181)..(184): Xaa in position 181 to 184 is any amino acid
  Variant (189)..(189): Xaa in position 189 is any amino acid
  Variant (193)..(193): Xaa in position 193 is any amino acid
MXDXXRVQKELXXCXXDXXXSGXXXXXXXXXXXXXXLXGTIXGPXXXPYEGGXFXIDIXLPXGYPFEPPKMXFXTKVWHPNISSQXGAICLDILKDQWSPALTLKTALXSXQALLSXPXPXDPQDAVVAXQYXXXXXXFXXTARXYWTEXFAKXXSXXXEXKVXKLVEMGFPXXXVRSXLXXXXGDENXALEXL

SEQ ID NO: 1459 - protein, 61 aa, Artificial sequence
  protein pattern
  Variant (6)..(6): Xaa in position 6 is any amino acid
  Variant (8)..(8): Xaa in position 8 is any amino acid
  Variant (12)..(12): Xaa in position 12 is any amino acid
  Variant (13)..(13): Xaa in position 13 is Ile, Leu or Met
  Variant (15)..(15): Xaa in position 15 is any or no amino acid
  Variant (17)..(17): Xaa in position 17 is any or no amino acid
  Variant (26)..(26): Xaa in position 26 is any amino acid
  Variant (28)..(28): Xaa in position 28 is any amino acid
  Variant (40)..(40): Xaa in position 40 is Asn or Ser
  Variant (47)..(47): Xaa in position 47 is Ile or Val
PYEGGXFXIDIXXPXGXYPFEPPKMXFXTKVWHPNISSQXGAICLDXLKDQWSPALTLKTA

SEQ ID NO: 1460 - protein, 20 aa, Artificial sequence
  protein pattern
  Variant (5)..(5): Xaa in position 5 is Ala or Ser
  Variant (7)..(7): Xaa in position 7 is Ala, Glu or Gln
  Variant (9)..(9): Xaa in position 9 is Asp or Lys
  Variant (18)..(18): Xaa in position 18 is Glu or Gln
ALLSXPXPXDPQDAVVAXQY

SEQ ID NO: 1461 - protein, 34 aa, Artificial sequence
  protein pattern
  Variant (3)..(3): Xaa in position 3 is any or no amino acid
  Variant (5)..(5): Xaa in position 5 is any or no amino acid
  Variant (12)..(12): Xaa in position 12 is Gly or Pro
  Variant (13)..(13): Xaa in position 13 is Asp or Glu
  Variant (14)..(14): Xaa in position 14 is Ala, Asp or Gly
  Variant (15)..(15): Xaa in position 15 is any amino acid
  Variant (16)..(16): Xaa in position 16 is Ala or Val
  Variant (17)..(17): Xaa in position 17 is Lys or Arg
  Variant (18)..(19): Xaa in position 18 to 19 is any amino acid
  Variant (20)..(20): Xaa in position 20 is Ile or Leu
  Variant (21)..(21): Xaa in position 21 is any amino acid
  Variant (22)..(22): Xaa in position 22 is Ala or Ser
  Variant (23)..(23): Xaa in position 23 is any amino acid
  Variant (24)..(24): Xaa in position 24 is Asp, Gly or Asn
  Variant (29)..(29): Xaa in position 29 is Leu, Met or Val
  Variant (33)..(33): Xaa in position 33 is Lys or Arg
KVXKXLVEMGFXXXXXXXXXXXXXGDENXALEXL

SEQ ID NO: 1462 - protein, 12 aa, Artificial sequence
  protein pattern
  Variant (2)..(2): Xaa in position 2 is Ala or Val
  Variant (3)..(3): Xaa in position 3 is Ala, Gly, Asn or Ser
  Variant (10)..(10): Xaa in position 10 is Glu or Gln
  Variant (11)..(11): Xaa in position 11 is Ala, Ser or Thr
FXXTARYWTXXF

SEQ ID NO: 1463 - protein, 11 aa, Artificial sequence
  protein pattern
  Variant (2)..(2): Xaa in position 2 is any amino acid
  Variant (6)..(6): Xaa in position 6 is Ala or Pro
  Variant (9)..(9): Xaa in position 9 is Ala, Ile or Val
  Variant (10)..(10): Xaa in position 10 is Asp or Gly
  Variant (11)..(11): Xaa in position 11 is Ser or Thr
LXGTIXGPXXX

SEQ ID NO: 1464 - DNA, 1620 bp, Arabidopsis thaliana
  CDS (1)..(1620)
atgactcacaaccattctaatgaagaaggctccattggaacctccttgcatggagttacagcaagagaacaagtcttctctttctccgtcgatgcttcgtctcaaacagtccaatcagacgatccaacagctaaattcgcccttccggttgattccgaacatcgagccaaagtgttcaacccactctcttttgctaaacctcacatgagagccttccacttaggatggctctcattcttcacatgcttcatctccaccttcgcggcagcaccattagtccccatcatccgcgacaacctcgacctcactaaaaccgacattggaaacgccggagtcgcatccgtctctggtgccattttctcaaggttagccatgggagcggtttgtgatctcctcggtgcacgatatgggactgccttctccctcatgctaaccgccccaaccgtcttctcaatgtcgtttgtgggtggccctagcggatacttaggcgtccggttcatgatcggattctgtctcgccacgtttgtatcatgccagtattggaccagcgttatgttcaacggtaagatcataggactagtgaacggctgtgcaggcgggtggggtgatatgggcggtggagtgactcaactcctaatgccgatggtcttccacgtcatcaaacttgccggagccactccgttcatggcctggcggatagctttcttcgttcccggatttcttcaagttgttatgggcattctcgtcctcagtctcggccaagatctccctgacggtaacctaagtacccttcagaagagtggtcaagtctctaaagacaaattctccaaggttttctggtttgctgtgaagaactacagaacatggattttattcgttctttatggatcttccatgggaattgaattaactatcaacaacgttatctccggatatttttacgacaggtttaaccttaagcttcaaacagctggtatagtagcagccagctttggaatggctaacttcatcgcccgtcccttcggtggttacgcttctgatgtagcggctcgggtttttggcatgagaggccggttatggaccttatggatctttcaaaccgtaggagctcttttctgtatctggctaggtcgagctagttcacttcccatagcaatcctagcaatgatgctcttctcaatcggtacacaagcagcttgcggagccctcttcggagttgcaccttttgtctcgcgccgctctctagggctcatatcgggactaaccggcgcaggaggaaacttcgggtccggtttgactcaactgcttttcttctcatcagcgaggtttagtacagctgagggactctcattgatgggcgttatggcggttttgtgcacactcccagttgcgtttatacattttccgcaatggggaagcatgtttttaagaccgtcgaccgatggagaaagatcacaggaggaatattattacggttctgagtggacggagaatgagaaacaacaaggattgcacgaaggaagcatcaaatttgcagagaatagtaggtcagagagaggccggaaagtagctttggctaacattccaacgccggagaacggaactccaagtcatgtttga

SEQ ID NO: 1465 - protein, 539 aa, Arabidopsis thaliana
MTHNHSNEEGSIGTSLHGVTAREQVFSFSVDASSQTVQSDDPTAKFALPVDSEHRAKVFNPLSFAKPHMRAFHLGWLSFFTCFISTFAAAPLVPIIRDNLDLTKTDIGNAGVASVSGAIFSRLAMGAVCDLLGARYGTAFSLMLTAPTVFSMSFVGGPSGYLGVRFMIGFCLATFVSCQYWTSVMFNGKIIGLVNGCAGGWGDMGGGVTQLLMPMVFHVIKLAGATPFMAWRIAFFVPGFLQVVMGILVLSLGQDLPDGNLSTLQKSGQVSKDKFSKVFWFAVKNYRTWILFVLYGSSMGIELTINNVISGYFYDRFNLKLQTAGIVAASFGMANFIARPFGGYASDVAARVFGMRGRLWTLWIFQTVGALFCIWLGRASSLPIAILAMMLFSIGTQAACGALFGVAPFVSRRSLGLISGLTGAGGNFGSGLTQLLFFSSARFSTAEGLSLMGVMAVLCTLPVAFIHFPQWGSMFLRPSTDGERSQEEYYYGSEWTENEKQQGLHEGSIKFAENSRSERGRKVALANIPTPENGTPSHV

SEQ ID NO: 1466 - DNA, 1833 bp, Arabidopsis thaliana
  CDS (72)..(1553)
gaaagataatgttcattgattgggtggtcgtgtaagtaagagtcgtcagcgagttttctactccgagagtaatggagccatctcaacgcaacaccaatccgccgtcgttttcagattccactatcccggttgattccgatggtcgagccaccgtcttccgaccattctctctctcctcgccacactcacgagcctttcacctagcttggctctcactcttctcatgcttcttctccaccttctccatccctcctctggtccccgtcatctcctccgacctcaacctctctgcctccaccgtatccgccgccggaatcgcttccttcgctggctccatcttctctcgcctcgctatgggaccactctgtgatctcatcggaccacgtacttcctcagcgattctctcttttctcaccgctcctgtaatcctctccgcctcactcgtctcctctccgacgtccttcatcctcgtccgtttcttcgtcggcttctcgctcgctaatttcgtagccaatcaatactggatgtcctccatgttctccggtaacgtcattggtctcgctaacggtgtctcagccggttgggctaacgtcggcgccggtatctctcagctccttatgcctctcatatactccaccatagccgaattccttccacgcgccgtcgcctggcgcgtgtccttcgtatttcccgccatttttcaggttacaacggccgtcctcgttctcctctacggccaagatactccccacggtaacagaaaaaactcgaaccagaacaaactcacaattcctgaagaagaagaagtactagtagttgaagaagacgaacgttccagtttcgtcgagatcctaatcggcggacttggaaattacagagcgtggatcttagcgctgctctacggatactcgtacggcgtcgagctaacgacggacaacgtgatcgccggatatttctacgagagatttggagtgaatctggaggcggcggggacgatcgcggcgagtttcgggatatcgaacattgcgtcgcgaccggcgggagggatgatatcggatgcgctggggaagagattcggtatgagagggaggctgtgggggctatggatcgtgcaatcggtggctgggttgttgtgcgtgttactcggacgagtcaactcgctctggggatcaatcctcgtcatgtgggtcttctctgttttcgttcaagctgcttctggccttgtatttggcgtggtccctttcgtctccaagcgatctttaggagtggtggcgggaattacgggaagcggcggtacggttggtgcggtggtgacgcagtttctgttgttttccggtgatgatgttcgaaaacagagaagcatttcacttatgggtttgatgacttttgtgtttgctctttctgttacatcaatttactttccacaatggggtggaatgtgttgtgggccttcgtcatcttccgaagaagaagatatttctcggggactccttgtagaagacgaagatgaagaaggtaaagtggttagtggtagtctacgtcccgtttgttgatgccgcatttgaactgctggcccatttggccaaagcaaaagcaatagcaaaacattagtatactactaataaggacgaatttgctgttatcaagttaaagagtctatcaatttttttaaatatatatatgttcttgtttgtgttgaaattctccttccataaacaacactagagctgacaacattgcaaaacaagacataattagtttgtatcctttttgtatctcttgtaacaatataggcaaagtgactctgacaaatcacaattgttttgatgagct

SEQ ID NO: 1467 - protein, 493 aa, Arabidopsis thaliana
MEPSQRNTNPPSFSDSTIPVDSDGRATVFRPFSLSSPHSRAFHLAWLSLFSCFFSTFSIPPLVPVISSDLNLSASTVSAAGIASFAGSIFSRLAMGPLCDLIGPRTSSAILSFLTAPVILSASLVSSPTSFILVRFFVGFSLANFVANQYWMSSMFSGNVIGLANGVSAGWANVGAGISQLLMPLIYSTIAEFLPRAVAWRVSFVFPAIFQVTTAVLVLLYGQDTPHGNRKNSNQNKLTIPEEEEVLVVEEDERSSFVEILIGGLGNYRAWILALLYGYSYGVELTTDNVIAGYFYERFGVNLEAAGTIAASFGISNIASRPAGGMISDALGKRFGMRGRLWGLWIVQSVAGLLCVLLGRVNSLWGSILVMWVFSVFVQAASGLVFGVVPFVSKRSLGVVAGITGSGGTVGAVVTQFLLFSGDDVRKQRSISLMGLMTFVFALSVTSIYFPQWGGMCCGPSSSSEEEDISRGLLVEDEDEEGKVVSGSLRPVC

SEQ ID NO: 1468 - DNA, 1620 bp, Dunaliella salina
  CDS (1)..(1620)
atggccacatcggccaaagagtccctggaggtgcccctcaacgcagccaccgctggcttcggtgcgggcatgccgggttacgacagggaaaagtggggctttgacctggatggagagaacaaggccaaggcgctcctgatgtggaagctgcagtctccccatgtccgcgcttttcatttgtcgtggatgttcttcttttccagcttcgtggccgcctttgcgatggctgcgcttgtgcctgtagttaggcagaacctggacttgaccaaggcagacctgggtgcctctggtatcacgactgtggtgggagccatcggagcacgtgtggtcattggtgctgtctgtgacactgttggcccacgcatggccacctcgggcgtgctgctgctcatcgccccatgcgtgttctgtgcatccctgattgtggaccgaggaggcatcattgctgtgcgcttcttcatcggcgtcggcctgtgcatttttgtctgcaaccagttctgggctggcactatgttcagccccaactgtgtgggcaccgtgaacgccacctgcggaggctggggcaacctgggcggtggtgttacccagctcatcatgcccctaatttacaccggcatcaagcagagcggcgtgcctggcttcactgcttggaggtggtccttcatggtccctggtgccatgttcctggtgctcgcttttggctgcctgtgcttctctcaagacgcccccaatggcagctaccgtgacatccgcaaagccaggacagtgcaagtggacggcaagaagaccttccttgctggcatcaggaactacaggacctgggtgctcaccctgaattatggttactgctttggcgtggagctcaccatcaacaacatcatcgtggcttacatgtttgaccagttcggcctgagcattgagattgcgggcattgtgggagccgtgtttggcctcatgaacatcttctgccgctccatgggcggcattgcgtccgacgtggctggcaagtacttcggcatgcgcgggcgtctgtggacctacttctgcctgcaactgctggtgggcgtcttttcaatcgtcctgggcactgtggacgagactctgggaggcaccattgcagtcatgatcatcttctccgcgttcgtacagagtgctgagggtgcctgctacggcgtcgtgccttttgtgtcccgccgatcatatggagtagtggctgggttggtgggcgctggaggcaacactgggtcggctgtcacccaagccctcttctttgctgacaatgagggtctgaagatgaccacccaagaaggtctgcagtggatgggagtgatggtgatggctgtgacctgcaccatttctgtgctccactggcctgcatggggcggcatgttcacgcctgccaaggctggtgccactgaggaggactactacctggcagagtgggatgctgaggaggtggctgccaacctgcacatcccctccctgcgctttgccatggagagcagatccatgcgcggcaagaagttattagagacgtacttggccaaggaggaggggctggagtgctcctcgcaggatgccaagaagaccatagctagcatccgtgaggactcaaactga

SEQ ID NO: 1469 - protein, 539 aa, Dunaliella salina
MATSAKESLEVPLNAATAGFGAGMPGYDREKWGFDLDGENKAKALLMWKLQSPHVRAFHLSWMFFFSSFVAAFAMAALVPVVRQNLDLTKADLGASGITTVVGAIGARVVIGAVCDTVGPRMATSGVLLLIAPCVFCASLIVDRGGIIAVRFFIGVGLCIFVCNQFWAGTMFSPNCVGTVNATCGGWGNLGGGVTQLIMPLIYTGIKQSGVPGFTAWRWSFMVPGAMFLVLAFGCLCFSQDAPNGSYRDIRKARTVQVDGKKTFLAGIRNYRTWVLTLNYGYCFGVELTINNIIVAYMFDQFGLSIEIAGIVGAVFGLMNIFCRSMGGIASDVAGKYFGMRGRLWTYFCLQLLVGVFSIVLGTVDETLGGTIAVMIIFSAFVQSAEGACYGVVPFVSRRSYGVVAGLVGAGGNTGSAVTQALFFADNEGLKMTTQEGLQWMGVMVMAVTCTISVLHWPAWGGMFTPAKAGATEEDYYLAEWDAEEVAANLHIPSLRFAMESRSMRGKKLLETYLAKEEGLECSSQDAKKTIASIREDSN

SEQ ID NO: 1470 - DNA, 1997 bp, Zea mays
  CDS (260)..(1822)
aaccggtgaagagcgctccgctgccgtgcgcgcccccgcgccggcctcccactggatcgctccacctcatgctccaaatctttattggtttccacgttgccccctcgccgtccccaaccatcgaccgcgccgcgcccgctgccgcctcccagctcgctctatataaacaccacgtacgcgccgaagcatcagcacagccacgtacgtacgaccggcttccggcaggtgagagaacagtgagaagcaggcgagcggtgacatggcggagggggagttcaagcccgcggcgatgcaggtggaggctcctgccgaggcggcggcggcgccgtccaagccgcggttcaggatgcccgtcgactccgacaacaaggccaccgagttctggctcttctccttcgcgaggccgcacatgagcgccttccacatgtcgtggttctccttcttctgctgcttcctctccaccttcgcggcgccgccgctgctcccgctcatccgggacacgctggggctcacggccacggacatcggcaacgccgggatcgcctccgtgtccggcgcggtcttcgcgcgcgtggccatgggcacggcgtgcgacctggtgggcccgcgcctggcgtccgcggccatcatactcctcaccacgcccgccgtctactactccgccgtcatcgactccgcctcgtcctacctgctcgtgcgcttcttcacgggcttctcgctcgcgtccttcgtgtccacgcagttctggatgagctccatgttctcgccgcccaaggtggggctggccaacggcgtcgccggggggtggggcaacctcggcggcggcgccgtgcagctcatcatgccgctcgtgttcgaggccatccgcaaggccggggccacgccgttcacggcgtggcgcgtcgccttcttcgtcccgggcctgctgcagacgctgtcggccgtcgccgtgctggcgttcggccaggacatgcccgacggcaactaccgcaagctgcacaggtccggcgacatgcacaaggacagcttcggcaacgtgctccgccacgccgtcaccaactaccgcgcctggatcctggcgctcacctacggatactgcttcggcgtggagctcgccgtggacaacatcgtcgcgcagtacttctacgaccgcttcggcgtcaagctcagcaccgccggcttcatcgccgccagcttcgggatggccaacatcgtctcccgccccggcggcggcctcctgtcggactggctctccagccgcttcggcatgcgcggcaggctgtggggcctgtgggtggtgcagaccatcgggggcgtcctctgcgtcgtgctcggcgccgtcgactactccttcgccgcgtccgtggccgtcatgatactcttctccatgttcgtgcaggcggcctgcgggctcacctttggcatcgtcccgttcgtctcccgaaggtcgctggggctcatctccggcatgaccggcggcggcggcaacgtgggcgccgtgctcacgcagctcatcttcttccacggatccaagtacaagacggagacggggatcaagtacatggggttcatgatcatcgcctgcacgttgcccatcacgctcatctacttcccgcagtggggcggcatgttcctggggccgcggcccggggcgacggcggaggactactacaaccgggagtggacagcgcacgagtgcgacaagggtttcaacaccgcgagcgtacgctttgcggagaacagcgtgcgggaagggggacgctcgggcagccagtccaagcacactactgtgcccgtcgagtcctcgccggccgacgtgtgaaacacacacaagcatacggtactgcccgtataatcagcggtccctcccgtgtcagcaaatcatatgtagtgttcctaagtcgtgatgactccgtacgtgtggtaatttctgtgtgaaggaaaaaccgggggtgaatttccggggggtgaaaaaaaaaaaaaaaaaaaaaaaaaaa

SEQ ID NO: 1471 - protein, 520 aa, Zea mays
MAEGEFKPAAMQVEAPAEAAAAPSKPRFRMPVDSDNKATEFWLFSFARPHMSAFHMSWFSFFCCFLSTFAAPPLLPLIRDTLGLTATDIGNAGIASVSGAVFARVAMGTACDLVGPRLASAAIILLTTPAVYYSAVIDSASSYLLVRFFTGFSLASFVSTQFWMSSMFSPPKVGLANGVAGGWGNLGGGAVQLIMPLVFEAIRKAGATPFTAWRVAFFVPGLLQTLSAVAVLAFGQDMPDGNYRKLHRSGDMHKDSFGNVLRHAVTNYRAWILALTYGYCFGVELAVDNIVAQYFYDRFGVKLSTAGFIAASFGMANIVSRPGGGLLSDWLSSRFGMRGRLWGLWVVQTIGGVLCVVLGAVDYSFAASVAVMILFSMFVQAACGLTFGIVPFVSRRSLGLISGMTGGGGNVGAVLTQLIFFHGSKYKTETGIKYMGFMIIACTLPITLIYFPQWGGMFLGPRPGATAEDYYNREWTAHECDKGFNTASVRFAENSVREGGRSGSQSKHTTVPVESSPADV

SEQ ID NO: 1472 - DNA, 1593 bp, Arabidopsis thaliana
  CDS (1)..(1593)
atgggtgattctactggtgagccggggagctccatgcatggagtcaccggtagagaacaaagctttgctttctcggtgcaatcaccaattgtgcataccgacaagacggccaagttcgaccttccggtggacacagagcataaggcaacggttttcaagctcttctccttcgccaaacctcacatgagaacgttccatctctcgtggatctctttctccacatgttttgtctcgactttcgcagctgcaccacttgtccctatcatccgggagaatctcaacctcaccaaacaagacattggaaacgccggagttgcctctgtctctgggagtatcttctctaggctcgtgatgggagccgtgtgtgatcttttgggtccccgttacggttgtgccttccttgtgatgttgtctgccccaacggtgttctccatgagcttcgtgagtgacgcagcaggcttcataacggtgaggttcatgattggtttttgcctggcgacgtttgtgtcttgtcaatactggatgagcactatgttcaacagtcagatcattggtctggtgaatgggacagcagccggatggggaaacatgggtggcggcataacgcagttgctcatgcccattgtgtatgaaatcattaggcgctgcggttccacagccttcacggcctggaggatcgccttctttgtacccggttggttgcacatcatcatgggaatcttggtgctcaatctaggtcaagatctgccagatggaaatcgagctaccttggagaaagcgggagaagttgccaaagacaaattcggaaagattctgtggtatgccgttacaaactacaggacttggatcttcgttcttctctacggatactccatgggagttgagttgagcactgataatgttatcgccgagtacttctttgacaggtttcacttgaagctccacacagcagggctcatagcagcatgtttcggaatggccaatttctttgctcgtccagcaggaggctacgcatctgactttgcagccaagtacttcgggatgagagggaggttgtggacgttgtggatcatacagacggctggtggcctcttctgtgtgtggctcggccgcgccaacacccttgtaactgccgttgtggctatggtgctcttctctatgggggcacaagctgcttgcggagccacctttgcaattgtgccctttgtctcccggcgagctctaggcatcatctcgggtttaaccggggctggagggaactttggatcagggctcacacaactcctcttcttctcgacctcacacttcacaactgaacaagggctaacgtggatgggagtgatgatagtcgcttgcacgttacctgtgaccttagttcactttcctcaatggggaagcatgttcttgcctccttccacagatccagtgaaaggtacagaggctcattattatggttctgagtggaatgagcaggagaagcagaagaacatgcatcaaggaagcctccggtttgccgagaacgccaagtcagagggtggacgccgcgtccgctctgctgctacgccgcctgagaacacacccaacaatgtttga

SEQ ID NO: 1473 - protein, 530 aa, Arabidopsis thaliana
MGDSTGEPGSSMHGVTGREQSFAFSVQSPIVHTDKTAKFDLPVDTEHKATVFKLFSFAKPHMRTFHLSWISFSTCFVSTFAAAPLVPIIRENLNLTKQDIGNAGVASVSGSIFSRLVMGAVCDLLGPRYGCAFLVMLSAPTVFSMSFVSDAAGFITVRFMIGFCLATFVSCQYWMSTMFNSQIIGLVNGTAAGWGNMGGGITQLLMPIVYEIIRRCGSTAFTAWRIAFFVPGWLHIIMGILVLNLGQDLPDGNRATLEKAGEVAKDKFGKILWYAVTNYRTWIFVLLYGYSMGVELSTDNVIAEYFFDRFHLKLHTAGLIAACFGMANFFARPAGGYASDFAAKYFGMRGRLWTLWIIQTAGGLFCVWLGRANTLVTAVVAMVLFSMGAQAACGATFAIVPFVSRRALGIISGLTGAGGNFGSGLTQLLFFSTSHFTTEQGLTWMGVMIVACTLPVTLVHFPQWGSMFLPPSTDPVKGTEAHYYGSEWNEQEKQKNMHQGSLRFAENAKSEGGRRVRSAATPPENTPNNV

SEQ ID NO: 1474 - DNA, 1569 bp, Arabidopsis thaliana
  CDS (1)..(1569)
atgggttctactgatgagcccggaagttccatgcatggagttaccggtagagaacagagctatgctttctcggtagatggtagtgagccgaccaacacaaagaaaaagtacaatctgccggtggacgcggaggataaggcaacggttttcaagctcttctccttcgccaaacctcacatgagaacgttccacctctcgtggatctctttctccacatgttttgtttcgacgttcgcagctgcaccacttatcccgatcatcagggagaatcttaacctcaccaaacatgacattggaaacgctggagttgcctccgtctcggggagtatcttctctaggctcgtgatgggagccgtgtgtgatcttttgggtcctcgttacggttgtgccttccttgtgatgttgtctgccccaacggtgttctccatgagcttcgtgagtgacgcagcaggcttcataacggtgaggttcatgattggtttttgcctggcgacgtttgtgtcttgtcaatactggatgagcactatgttcaacagtcagatcatcggtctggtgaacgggacagcagccggatggggaaacatgggtggcggcataacgcagttgctcatgcccattgtgtatgaaatcattaggcgctgcggatcaacagcgttcacggcctggaggatcgccttctttgtccccggttggttgcacatcatcatgggaatcttggtgctcacgctaggtcaagatctgccaggtggaaacagagctgccatggagaaagcgggagaagttgccaaagacaaattcggaaagattctatggtacgccgttacaaattacaggacttggattttcgttcttctgtatggatattccatgggagttgagttaagcacagacaatgttatcgccgagtacttctttgataggtttcacttgaagcttcacacagcggggattatagcagcatgtttcggaatggccaatttctttgctcgtccagcaggaggctgggcatctgacattgcagccaagcgcttcggaatgcgagggaggttgtggactttgtggatcattcagacgtccggtggtctcttttgtgtgtggctcggacgtgccaacaccctcgtcactgccgttgtatctatggtcctcttctctttaggagcacaagccgcttgcggagccacctttgctatcgtgccctttgtctcccggcgagctctaggcattatctcgggtttaaccggggctggagggaactttgggtcaggactcacacagctcgtctttttctcgacttcgcgcttcacaactgaagaagggctaacgtggatgggagtgatgatagttgcttgcacgttgcctgttaccttaatccactttcctcagtggggaagcatgttcttccctccttccaacgattcggtcgacgctacggagcactattatgttggcgaatatagtaaggaggagcagcagattggcatgcatttaaaaagcaaactgtttgctgatggagccaagaccgagggaggcagcagcgtccacaaagggaacgcaaccaacaatgcttga

SEQ ID NO: 1475 - protein, 522 aa, Arabidopsis thaliana
MGSTDEPGSSMHGVTGREQSYAFSVDGSEPTNTKKKYNLPVDAEDKATVFKLFSFAKPHMRTFHLSWISFSTCFVSTFAAAPLIPIIRENLNLTKHDIGNAGVASVSGSIFSRLVMGAVCDLLGPRYGCAFLVMLSAPTVFSMSFVSDAAGFITVRFMIGFCLATFVSCQYWMSTMFNSQIIGLVNGTAAGWGNMGGGITQLLMPIVYEIIRRCGSTAFTAWRIAFFVPGWLHIIMGILVLTLGQDLPGGNRAAMEKAGEVAKDKFGKILWYAVTNYRTWIFVLLYGYSMGVELSTDNVIAEYFFDRFHLKLHTAGIIAACFGMANFFARPAGGWASDIAAKRFGMRGRLWTLWIIQTSGGLFCVWLGRANTLVTAVVSMVLFSLGAQAACGATFAIVPFVSRRALGIISGLTGAGGNFGSGLTQLVFFSTSRFTTEEGLTWMGVMIVACTLPVTLIHFPQWGSMFFPPSNDSVDATEHYYVGEYSKEEQQIGMHLKSKLFADGAKTEGGSSVHKGNATNNA

SEQ ID NO: 1476 - DNA, 1509 bp, Arabidopsis thaliana
  CDS (1)..(1509)
atggaggtcgaaggcaaaggaggagaagctggaaccaccaccacaaccgcacctcggaggttcgcacttccggtggacgcggagaacaaagcaacaactttccgactattctcagtcgctaaacctcacatgagagctttccatctctcatggtttcaattcttttgctgcttcgtctccactttcgcagctccgcctctcctccctgttatccgtgaaaatcttaacctcaccgccaccgacatcggaaacgccggaatagcctctgtctccggcgctgttttcgctcgtatcgtcatgggcacggcatgtgatcttttcggtccacgtctagcctccgccgctttgacgctctccaccgctcccgccgtctatttcaccgccgggataaagtctccgatcgggtttatcatggtgagattcttcgccggattctctctcgccactttcgtctcgactcagttctggatgagctccatgttctctggacccgtcgtgggttcggctaacggaatcgccgccgggtggggtaacctcggaggaggcgcgacgcagctgatcatgcccatcgtgttctcgttgattcgtaatatgggagccaccaagttcaccgcgtggaggatcgcttttttcatccccggtctctttcagactctctctgctttcgccgttctcttgttcggtcaggatcttcctgatggagattattgggcgatgcataaatctggagagagggagaaagatgatgtggggaaagtgatatctaatggaatcaaaaactataggggatggataacagcattagcatatggctattgttttggagtagagcttaccattgacaacatcatcgcagaatatttcttcgatagattccatttaaagctccagacagcagggattatagcagcgagttttggactagccaattttttcgctagacctggaggaggaattttctctgattttatgtcgagacggtttgggatgagaggaaggttgtgggcttggtggattgtgcaaacatcaggaggtgtattatgcgcatgtcttggccagatttcttccttgacagtgtctataattgttatgcttgtcttctctgtattcgtccaagccgcttgtggacttacctttggcgttgttccctttatttctagaagatctcttggggtggtatcgggaatgactggtgcgggaggcaatgtaggcgcggtcttaacacagttgatattcttcaaaggatcgacatacacgagagagacgggtataactctaatgggggtaatgtcaatcgcatgttcattaccaatatgcttgatttactttccgcaatggggaggtatgttttgtggaccctcttccaaaaaagtaactgaagaagactattatctcgccgaatggaacgatgaagagaaagaaaagaacttacatatcggaagccaaaaatttgcggaaaccagcattagcgaaagaggtcgagccacaacgactcatccccaaacttga

SEQ ID NO: 1477 - protein, 502 aa, Arabidopsis thaliana
MEVEGKGGEAGTTTTTAPRRFALPVDAENKATTFRLFSVAKPHMRAFHLSWFQFFCCFVSTFAAPPLLPVIRENLNLTATDIGNAGIASVSGAVFARIVMGTACDLFGPRLASAALTLSTAPAVYFTAGIKSPIGFIMVRFFAGFSLATFVSTQFWMSSMFSGPVVGSANGIAAGWGNLGGGATQLIMPIVFSLIRNMGATKFTAWRIAFFIPGLFQTLSAFAVLLFGQDLPDGDYWAMHKSGEREKDDVGKVISNGIKNYRGWITALAYGYCFGVELTIDNIIAEYFFDRFHLKLQTAGIIAASFGLANFFARPGGGIFSDFMSRRFGMRGRLWAWWIVQTSGGVLCACLGQISSLTVSIIVMLVFSVFVQAACGLTFGVVPFISRRSLGVVSGMTGAGGNVGAVLTQLIFFKGSTYTRETGITLMGVMSIACSLPICLIYFPQWGGMFCGPSSKKVTEEDYYLAEWNDEEKEKNLHIGSQKFAETSISERGRATTTHPQT

SEQ ID NO: 1478 - DNA, 1629 bp, Arabidopsis thaliana
  CDS (1)..(1629)
atggctcacaaccattctaatgaagacggctctattggaacctccttgcatggagtcacggcaagggagcaagtcttctccttctccgtccaagaagatgtcccttcatctcaagccgtccgaacaaacgatccaacggctaagtttgccctaccagtggactccgaacatagggcaaaagtgttcaaaccactatcattcgctaaaccacatatgagagccttccacttaggatggatctctttcttcacttgcttcatctccaccttcgcagccgcacctctagtccccgtcattcgcgacaatctcgacctgaccaaaaccgacatcggaaatgctggagttgcatcagtttccggcgccattttctcgagactcgctatgggtgctgtatgtgaccttctaggggcacgttatggaaccgccttctcacttatgcttacagctccagcagttttctccatgtcgttcgtagctgacgcgggaagctacttagccgtaaggttcatgatcggtttttgcttagcaacgttcgtatcatgtcagtactggacgagtgttatgttcactggaaagattatcggactcgttaacggatgtgctggagggtggggagatatgggaggaggagtgactcagctactaatgccaatggtcttccacgtcatcaaactcaccggagccactcccttcacggcttggaggttcgccttcttcatccccggcattcttcagatagttatgggtattctcgttctcactctcggccaagatcttcccgatggtaacctcagtactctccaaaagagtggtcaagtttctaaagacaaattctccaaggtcttttggttcgctgtgaaaaactatagaacatggatcttattcatgctctatggattttctatgggagttgaattaacgatcaacaacgttatatctggatacttctacgataggtttaaccttacgcttcacacagctggtattatagcagccagctttggtatggcaaacttctttgcccgtccttttggtggctacgcttcagatgtagctgcacggctcttcggtatgaggggacggttatggatcttgtggatcttacaaactgttggagctctcttttgcatctggcttggtcgtgctagttcactacctatagctatcttagccatgatgcttttttccatgggcacacaagctgcttgtggagctctctttggtgttgctccttttgtttcccgccgttctcttggacttatctcgggattaactggtgctggtggaaattttgggtcgggagttactcaacttcttttcttctcttcctcgaggtttagtacggcggaaggactatcgttgatgggcgttatggctgttgtgtgctctcttccggttgcgtttatacattttccgcagtggggaagcatgttcttgaggccatcacaagatggagagaaatcaaaggaagagcattactatggagcggaatggacagaggaagagaagagcttaggactacacgaaggaagcattaaatttgctgaaaacagccggtcagagagaggccgcaaggcgatgttggctgatattccaacgccggaaaccggatctccggctcatgtctag

SEQ ID NO: 1479 - protein, 542 aa, Arabidopsis thaliana
MAHNHSNEDGSIGTSLHGVTAREQVFSFSVQEDVPSSQAVRTNDPTAKFALPVDSEHRAKVFKPLSFAKPHMRAFHLGWISFFTCFISTFAAAPLVPVIRDNLDLTKTDIGNAGVASVSGAIFSRLAMGAVCDLLGARYGTAFSLMLTAPAVFSMSFVADAGSYLAVRFMIGFCLATFVSCQYWTSVMFTGKIIGLVNGCAGGWGDMGGGVTQLLMPMVFHVIKLTGATPFTAWRFAFFIPGILQIVMGILVLTLGQDLPDGNLSTLQKSGQVSKDKFSKVFWFAVKNYRTWILFMLYGFSMGVELTINNVISGYFYDRFNLTLHTAGIIAASFGMANFFARPFGGYASDVAARLFGMRGRLWILWILQTVGALFCIWLGRASSLPIAILAMMLFSMGTQAACGALFGVAPFVSRRSLGLISGLTGAGGNFGSGVTQLLFFSSSRFSTAEGLSLMGVMAVVCSLPVAFIHFPQWGSMFLRPSQDGEKSKEEHYYGAEWTEEEKSLGLHEGSIKFAENSRSERGRKAMLADIPTPETGSPAHV

SEQ ID NO: 1480 - DNA, 1584 bp, Arabidopsis thaliana
  CDS (1)..(1584)
atggccgatggttttggtgaaccgggaagctcaatgcatggagtcaccggcagagaacaaagctatgcattctctgtcgagtctccggcagttccttccgactcatcagcaaaattttctctccccgtggacaccgaacacaaagccaaagtcttcaaactcttatcctttgaagctccacatatgagaactttccatcttgcttggatctcattcttcacttgcttcatttccactttcgctgctgctcctcttgtccccatcattagagataaccttaatctcacaagacaagatgtcggaaatgctggtgttgcttctgtctctggcagtatcttctctaggcttgttatgggagcagtttgtgatctccttgggccacgttatggctgtgctttcctcgtcatgctctctgctccaaccgtcttctccatgtctttcgttggtggtgccggagggtacataacggtgaggttcatgatcgggttctgcctggcgactttcgtgtcatgccagtattggatgagcacaatgttcaatggtcagatcataggtctagtgaacgggacagcggcagggtgggggaacatgggcggtggggtcactcagttgctcatgccaatggtctatgagatcatccgacggttagggtccacgtccttcaccgcatggaggatggctttcttcgtccccgggtggatgcacatcatcatggggatcttggtcttgactctagggcaagacctccctgatggtaatagaagcacactcgagaagaaaggtgcagttactaaagacaagttctcaaaggttttatggtacgcgatcacgaactataggacatgggttttcgtgctgctatatggatactccatgggagtagagctcacaaccgataacgtcatcgctgagtactttttcgacaggttccatcttaagcttcataccgccggtataatcgcggcaagctttggtatggcaaacttctttgcccgtcctattggtggttgggcctcagatattgcggctagacgcttcggcatgagaggccgtctctggaccctatggatcatccaaaccttaggcggtttcttctgcctatggctaggccgagccaccacgctcccgaccgcggttgtcttcatgatcctcttctctctcggcgctcaagccgcttgtggagctacctttgctatcatacctttcatctcacgccgctccttagggatcatctctggtcttactggagctggtggaaacttcggctctggtttgacccaactcgtattcttctcgacctcaacgttctccacggaacaagggctgacatggatgggggtgatgattatggcgtgtacattacccgtcactttagtgcacttcccgcaatggggaagcatgtttttgccttccacggaagatgaagtgaagtctacggaggagtattattacatgaaagagtggacagagaccgagaagcgaaagggtatgcatgaagggagtttgaagttcgccgtgaatagtagatcggagcgtggacggcgcgtggcttctgcaccgtctcctccgccggaacacgtttaa

SEQ ID NO: 1481 - protein, 527 aa, Arabidopsis thaliana [sequence omitted]

SEQ ID NO: 1482 - DNA, 1551 bp, Oryza sativa (japonica cultivar-group)
  CDS (1)..(1551)
atggaggctaagccggtggcgatggaggtggagggggtcgaggcggcggggggcaagccgcggttcaggatgccggtggactccgacctcaaggcgacggagttctggctcttctccttcgcgaggccacacatggcctccttccacatggcgtggttctccttcttctgctgcttcgtgtccacgttcgccgcgccgccgctgctgccgctcatccgcgacaccctcgggctcacggccacggacatcggcaacgccgggatcgcgtccgtgtcgggcgccgtgttcgcgcgtctggccatgggcacggcgtgcgacctggtcgggcccaggctggcctccgcgtctctgatcctcctcaccacaccggcggtgtactgctcctccatcatccagtccccgtcggggtacctcctcgtgcgcttcttcacgggcatctcgctggcgtcgttcgtgtcggcgcagttctggatgagctccatgttctcggcccccaaagtggggctggccaacggcgtggccggcggctggggcaacctcggcggcggcgccgtccagctgctcatgccgctcgtgtacgaggccatccacaagatcggtagcacgccgttcacggcgtggcgcatcgccttcttcatcccgggcctgatgcagacgttctcggccatcgccgtgctggcgttcgggcaggacatgcccggcggcaactacgggaagctccacaagactggcgacatgcacaaggacagcttcggcaacgtgctgcgccacgccctcaccaactaccgcggctggatcctggcgctcacctacggctacagcttcggcgtcgagctcaccatcgacaacgtcgtgcaccagtacttctacgaccgcttcgacgtcaacctccagaccgccgggctcatcgccgccagcttcgggatggccaacatcatctcccgccccggcggcgggctactctccgactggctctccagccggtacggcatgcgcggcaggctgtgggggctgtggactgtgcagaccatcggcggcgtcctctgcgtggtgctcggaatcgtcgacttctccttcgccgcgtccgtcgccgtgatggtgctcttctccttcttcgtccaggccgcgtgcgggctcaccttcggcatcgtgccgttcgtgtcgcggaggtcgctggggctcatctccgggatgaccggcggcgggggcaacgtgggcgccgtgctgacgcagtacatcttcttccacggcacaaagtacaagacggagaccgggatcaagtacatggggctcatgatcatcgcgtgcacgctgcccgtcatgctcatctacttcccgcagtggggcggcatgctcgtaggcccgaggaagggggccacggcggaggagtactacagccgggagtggtcggatcacgagcgcgagaagggtttcaacgcggccagcgtgcggttcgcggagaacagcgtgcgcgagggcgggaggtcgtcggcgaatggcggacagcccaggcacaccgtccccgtcgacgcgtcgccggccggggtgtga

SEQ ID NO: 1483 - protein, 516 aa, Oryza sativa (japonica cultivar-group)
MEAKPVAMEVEGVEAAGGKPRFRMPVDSDLKATEFWLFSFARPHMASFHMAWFSFFCCFVSTFAAPPLLPLIRDTLGLTATDIGNAGIASVSGAVFARLAMGTACDLVGPRLASASLILLTTPAVYCSSIIQSPSGYLLVRFFTGISLASFVSAQFWMSSMFSAPKVGLANGVAGGWGNLGGGAVQLLMPLVYEAIHKIGSTPFTAWRIAFFIPGLMQTFSAIAVLAFGQDMPGGNYGKLHKTGDMHKDSFGNVLRHALTNYRGWILALTYGYSFGVELTIDNVVHQYFYDRFDVNLQTAGLIAASFGMANIISRPGGGLLSDWLSSRYGMRGRLWGLWTVQTIGGVLCVVLGIVDFSFAASVAVMVLFSFFVQAACGLTFGIVPFVSRRSLGLISGMTGGGGNVGAVLTQYIFFHGTKYKTETGIKYMGLMIIACTLPVMLIYFPQWGGMLVGPRKGATAEEYYSREWSDHEREKGFNAASVRFAENSVREGGRSSANGGQPRHTVPVDASPAGV

SEQ ID NO: 1484 - DNA, 1602 bp, Oryza sativa (japonica cultivar-group)
  CDS (1)..(1602)
atggactcgtcgacggtgggcgctccggggagctcgctgcacggcgtgacggggcgcgagccggcgttcgcgttctcgacggaggtgggcggcgaggacgcggcggcggcgagcaagttcgacttgccggtggactcggagcacaaggcgaagacgatcaggttgctgtcgttcgcgaacccgcatatgaggacgttccacctatcatggatctccttcttctcctgcttcgtctccaccttcgccgccgcccctctcgtccccatcatccgcgacaacctcaacctcaccaaggccgacatcggcaacgccggcgtcgcctccgtctccggctccatcttctccaggctcgccatgggcgccatctgcgacatgctcggcccgcgctacggctgcgccttcctcatcatgctcgccgcgcccaccgtcttctgcatgtcgctcatcgactccgccgcggggtacatcgccgtgcgcttcctcatcggcttctccctcgccaccttcgtgtcatgccagtactggatgagcaccatgttcaacagcaagatcatcggcctcgtcaacggcctcgccgccgggtggggaaacatgggcggcggcgcgacgcagctcatcatgccgctcgtctacgacgtgatccgcaagtgcggcgcgacgccgttcacggcgtggaggctggcctacttcgtgccggggacgctgcacgtggtgatgggcgtgctggtgctgacgctggggcaggacctccccgacggcaacctgcgcagcctgcagaagaagggtgacgtcaacagggacagcttctccagggtgctctggtacgccgtcaccaactaccgcacctggatcttcgtcctcctctacggctactccatgggcgtcgagctcaccaccgacaacgtcatcgccgagtacttctacgatcgcttcgacctcgacctccgcgtcgccggcatcatcgccgcatccttcggcatggccaacatcgtcgcgcgccccaccggcggcctcctctcggacctcggcgcgcgctacttcggcatgcgcgcccgcctctggaacatttggatcctccagaccgccggcggcgcgttctgcctcctgctcggccgcgcatccaccctccccacctccgtcgtctgcatggtcctcttctccttctgcgcgcaggccgcctgcggcgccatcttcggcgtcatccccttcgtctcccgccgctcgctcggcatcatctccggcatgaccggcgccggcggcaacttcggcgccgggctcacgcagctgctcttcttcacgtcgtcgaggtactccacgggcacggggctggagtacatgggcatcatgatcatggcgtgcacgctgccggtggtgctcgtccatttcccgcagtggggctccatgttcctcccgcccaacgccggcgccgaggaggagcactactacggctccgagtggagcgaacaggagaagagcaagggcctccacggtgcaagtctcaagttcgccgagaactcccgctccgagcgtggccgccgcaacgtcatcaacgccgccgccgccgccgccacgccgcccaacaactcgccggagcacgcctaa

SEQ ID NO: 1485 - protein, 533 aa, Oryza sativa (japonica cultivar-group)
MDSSTVGAPGSSLHGVTGREPAFAFSTEVGGEDAAAASKFDLPVDSEHKAKTIRLLSFANPHMRTFHLSWISFFSCFVSTFAAAPLVPIIRDNLNLTKADIGNAGVASVSGSIFSRLAMGAICDMLGPRYGCAFLIMLAAPTVFCMSLIDSAAGYIAVRFLIGFSLATFVSCQYWMSTMFNSKIIGLVNGLAAGWGNMGGGATQLIMPLVYDVIRKCGATPFTAWRLAYFVPGTLHVVMGVLVLTLGQDLPDGNLRSLQKKGDVNRDSFSRVLWYAVTNYRTWIFVLLYGYSMGVELTTDNVIAEYFYDRFDLDLRVAGIIAASFGMANIVARPTGGLLSDLGARYFGMRARLWNIWILQTAGGAFCLLLGRASTLPTSVVCMVLFSFCAQAACGAIFGVIPFVSRRSLGIISGMTGAGGNFGAGLTQLLFFTSSRYSTGTGLEYMGIMIMACTLPVVLVHFPQWGSMFLPPNAGAEEEHYYGSEWSEQEKSKGLHGASLKFAENSRSERGRRNVINAAAAAATPPNNSPEHA

SEQ ID NO: 1486 - DNA, 1890 bp, Glycine max
  CDS (61)..(1653)
tcacactttcttccttaattttctagctcttgctacgtacttgaattcaattagttattaatggctgagattgagggttctcccggaagctccatgcatggagtaacaggaagagaacaaacatttgtagcctcagttgcttctccaattgtccctacagacaccacagccaaatttgctctcccagtggattcagaacacaaggccaaggttttcaaactcttctccctggccaatccccacatgagaaccttccacctttcttggatctccttcttcacctgcttcgtctcgacattcgcagcagcacctcttgtgcccatcatccgcgacaaccttaacctcaccaaaagcgacattggaaacgccggggttgcttctgtctccggaagcatcttctcaaggctcgcaatgggtgcagtctgtgacatgttgggtccacgctatggctgcgccttcctcatcatgctttcggcccctacggtgttctgcatgtcctttgtgaaagatgctgcggggtacatagcggttcggttcttgattgggttctcgttggcgacgtttgtgtcgtgccagtactggatgagcacgatgttcaacagtaagattatagggcttgcgaatgggactgctgcggggtgggggaacatgggtggtggagccactcagctcataatgcctttggtgtatgagcttatcagaagagctggggctactcccttcactgcttggaggattgccttctttgttccgggtttcatgcatgtcatcatggggattcttgtcctcactctaggccaggacttgcctgatggaaacctcggggccttgcggaagaagggtgatgtagctaaagacaagttttccaaggtgctatggtatgccataacaaattacaggacatggatttttgctctcctctatgggtactccatgggagttgaattaacaactgacaatgtcattgctgagtatttctatgacagatttaatctcaagctacacactgctggaatcattgctgcttcatttggaatggcaaacttagttgctcgaccttttggtggatatgcttcagatgttgcagccaggctgtttggcatgaggggaagactctggaccctttggatcctccaaaccttaggaggggttttctgtatttggcttggccgtgccaattctcttcctattgctgtattggccatgatcctgttctctataggagctcaagctgcatgtggtgcaacttttggcatcattcctttcatctcaagaaggtctttggggatcatatcaggtctaactggtgcaggtggaaactttgggtctggcctcacccaattggtcttcttttcaacctccaaattctctactgccacaggtctctccttgatgggtgtaatgatagtggcttgcactctaccagtgagtgttgttcacttcccacagtggggtagcatgtttctaccaccctcaaaagatgtcagcaaatccactgaagaattctattacacctctgaatggaatgaggaagagaagcagaagggtttgcaccagcaaagtctcaaatttgctgagaatagccgatctgagagaggaaagcgagtggcttcagcaccaacacctccaaatgcaactcccactcatgtctagccatagcacttcaatcaaagaagatcatgaaacataattactgagcagtattgggaatgaagaaccatgagttgaagaattttctaataagaaatcttgtaacatgtagacatagaatgttctggttctggtttgcgtgtggtgtaagagttgtctacttgtggtaagtcataagtatcataatcagtatgtcaatgcagatcttgatgctgagtatcaatagtatcaaaaaaaaaa

SEQ ID NO: 1487 - protein, 530 aa, Glycine max
MAEIEGSPGSSMHGVTGREQTFVASVASPIVPTDTTAKFALPVDSEHKAKVFKLFSLANPHMRTFHLSWISFFTCFVSTFAAAPLVPIIRDNLNLTKSDIGNAGVASVSGSIFSRLAMGAVCDMLGPRYGCAFLIMLSAPTVFCMSFVKDAAGYIAVRFLIGFSLATFVSCQYWMSTMFNSKIIGLANGTAAGWGNMGGGATQLIMPLVYELIRRAGATPFTAWRIAFFVPGFMHVIMGILVLTLGQDLPDGNLGALRKKGDVAKDKFSKVLWYAITNYRTWIFALLYGYSMGVELTTDNVIAEYFYDRFNLKLHTAGIIAASFGMANLVARPFGGYASDVAARLFGMRGRLWTLWILQTLGGVFCIWLGRANSLPIAVLAMILFSIGAQAACGATFGIIPFISRRSLGIISGLTGAGGNFGSGLTQLVFFSTSKFSTATGLSLMGVMIVACTLPVSVVHFPQWGSMFLPPSKDVSKSTEEFYYTSEWNEEEKQKGLHQQSLKFAENSRSERGKRVASAPTPPNATPTHV

SEQ ID NO: 1488 - DNA, 1709 bp, Arabidopsis thaliana
  CDS (43)..(1611)
aaacttgaattttctcaaaggaacttgatacgtttaaaatacatgggttctactgatgagcccagaagttccatgcatggagttaccggtagagaacagagctatgctttctcggtagatggtagtgagccgaccaacacaaagaaaaagtacaatctgccggtggacgcggaggataaggcaacggttttcaagctcttctccttcgccaaacctcacatgagaacgttccacctctcgtggatctctttctccacatgttttgtttcgacgttcgcagctgcaccacttatcccgatcatcagggagaatcttaacctcaccaaacatgacattggaaacgctggagttgcctccgtctcggggagtatcttctctaggctcgtgatgggagccgtgtgtgatcttttgggtcctcgttacggttgtgccttccttgtgatgttgtctgccccaacggtgttctccatgagcttcgtgagtgacgcagcaggcttcataacggtgaggttcatgattggtttttgcctggcgacgtttgtgtcttgtcaatactggatgagcactatgttcaacagtcagatcatcggtctggtgaacgggacagcagccggatggggaaacatgggtggcggcataacgcagttgctcatgcccattgtgtatgaaatcattaggcgctgcggatcaacagcgttcacggcctggaggatcgccttctttgtccccggttggttgcacatcatcatgggaatcttggtgctcacgctaggtcaagatctgccaggtggaaacagagctgccatggagaaagcgggagaagttgccaaagacaaattcggaaagattctatggtacgccgttacaaattacaggacttggattttcgttcttctgtatggatattccatgggagttgagttaagcacagacaatgttatcgccgagtacttctttgacaggtttcacttgaagcttcacacagcggggattatagcagcatgtttcggaatggccaatttctttgctcgtccagcaggaggctgggcatctgacattgcagccaagcgcttcggaatgcgagggaggttgtggactttgtggatcattcagacgtccggtggtctcttttgtgtgtggctcggacgtgccaacaccctcgtcactgccgttgtatctatggtcctcttctctttaggagcacaagccgcttgcggagccacctttgctatcgtgccctttgtctcccggcgagctctaggcattatctcgggtttaaccggggctggagggaactttgggtcaggactcacacagctcgtctttttctcgacttcgcgcttcacaactgaagaagggctaacgtggatgggagtgatgatagttgcttgcacgttgcctgttaccttaatccactttcctcagtggggaagcatgttcttccctccttccaacgattcggtcgacgctacggagcactattatgttggcgaatatagtaaggaggagcagcagattggcatgcatttaaaaagcaaactgtttgctgatggagccaagaccgagggaggcagcagcgtccacaaagggaacgcaaccaacaatgcttgatcatgtgtcattgatatcaagaaattaataatttcacttatgtgaaatggacataaactgttggaaaataaagaaccatttctttcatcatttgcttt

SEQ ID NO: 1489 - protein, 522 aa, Arabidopsis thaliana
MGSTDEPRSSMHGVTGREQSYAFSVDGSEPTNTKKKYNLPVDAEDKATVFKLFSFAKPHMRTFHLSWISFSTCFVSTFAAAPLIPIIRENLNLTKHDIGNAGVASVSGSIFSRLVMGAVCDLLGPRYGCAFLVMLSAPTVFSMSFVSDAAGFITVRFMIGFCLATFVSCQYWMSTMFNSQIIGLVNGTAAGWGNMGGGITQLLMPIVYEIIRRCGSTAFTAWRIAFFVPGWLHIIMGILVLTLGQDLPGGNRAAMEKAGEVAKDKFGKILWYAVTNYRTWIFVLLYGYSMGVELSTDNVIAEYFFDRFHLKLHTAGIIAACFGMANFFARPAGGWASDIAAKRFGMRGRLWTLWIIQTSGGLFCVWLGRANTLVTAVVSMVLFSLGAQAACGATFAIVPFVSRRALGIISGLTGAGGNFGSGLTQLVFFSTSRFTTEEGLTWMGVMIVACTLPVTLIHFPQWGSMFFPPSNDSVDATEHYYVGEYSKEEQQIGMHLKSKLFADGAKTEGGSSVHKGNATNNA

SEQ ID NO: 1490 - DNA, 1837 bp, Hordeum vulgare
  CDS (91)..(1614)
gaattcgcggccgctcccttactacattgcaagccaagctcaagagcagcagcaacagccaccattagctgcttctagttgttggcaaagatggaggtcgaggcgggcgcccatggcgacactgccgcgagcaagttcacgctgccggtagactccgagcacaaggccaagtccttcaggctcttctccttcgccaacccgcacatgcgcaccttccatctctcgtggatctccttcttcacttgcttcatctccaccttcgccgcagcgccccttgtccccatcattcgtgataacctcaaccttgccaaggccgacatcggcaatgccggtgtggcatccgtttctgggtccatcttctccaggcttgccatgggtgccatctgcgatctcctcgggccgcggtatggatgtgcattcctcgtcatgctctcggcaccgaccgttttctgcatggccgttatcgatgatgcctcagggtacatcgccgtccgctttctcattggcttctcgcttgctacgttcgtgtcatgccaatattggatgagcaccatgtttaatagcaagatcatcggcacagtcaacggcctcgctgctggatggggcaacatgggtggtggcgccacgcagctcatcatgccgctcgtcttccatgcaatccagaagtgtggtgccacgcccttcgtagcgtggcgtattgcctacttcgtgcccggaatgatgcacatcgtgatgggcttgttggtactcaccatggggcaagatctccctgatgggaacctcgcaagtctccagaagaagggagacatggccaaggacaagttctccaaggtcctttggggcgccgttaccaactaccgaacatggatctttgtcctcctctatggctactgcatgggtgtcgagctcaccaccgacaatgtcattgccgagtactacttcgaccacttccacctagacctccgtgccgccggtaccatcgctgcctgcttcggcatggccaacatcgtcgcacgtcctacgggtggctacctctctgaccttggcgcccgctatttcggcatgcgtgctcgcctctggaatatctggatcctccaaaccgctggtggcgctttctgcatctggctcggtcgtgcatcggccctccctgcctcggtgaccgccatggtcctcttctccatctgcgcccaggctgcgtgtggtgctatctttggtgtcgcacccttcgtctccaggcgttcccttggcatcatttccgggttgaccggtgctggtggaaacgtgggcgcagggctcacacagcttctcttcttcacgtcatcgcaatactccactggtaggggtctcgagtacatgggcatcatgatcatggcatgcacgctgcccgtcgctcttgtgcacttcccacaatggggatccatgttcttccctgccagcgccgacgccacggaggaggagtactacgcctcggagtggtccgaagaggagaaagccaagggtctccatatcgccggccaaaaatttgctgagaattcccgctcggagcgcggtaggcgcaacgtcatccttgccacgtccgccacaccacccaacaatacgccccagcacgtatgagactggattgtttttcatacctatgtacaagtactgaactacagtgcacgttcgtatatatatacgcctgcaacatcggctgtaataaggcgtatgaatttacatttgtagtgtaggcctgtgtaatgcgtttcttacgcacgaaatgtttggtctgtgcatgcacgcatgcgagggtacctgtgctctgaatttacaacagctttgaggcggccgcgaattc

SEQ ID NO: 1491 - protein, 507 aa, Hordeum vulgare
MEVEAGAHGDTAASKFTLPVDSEHKAKSFRLFSFANPHMRTFHLSWISFFTCFISTFAAAPLVPIIRDNLNLAKADIGNAGVASVSGSIFSRLAMGAICDLLGPRYGCAFLVMLSAPTVFCMAVIDDASGYIAVRFLIGFSLATFVSCQYWMSTMFNSKIIGTVNGLAAGWGNMGGGATQLIMPLVFHAIQKCGATPFVAWRIAYFVPGMMHIVMGLLVLTMGQDLPDGNLASLQKKGDMAKDKFSKVLWGAVTNYRTWIFVLLYGYCMGVELTTDNVIAEYYFDHFHLDLRAAGTIAACFGMANIVARPTGGYLSDLGARYFGMRARLWNIWILQTAGGAFCIWLGRASALPASVTAMVLFSICAQAACGAIFGVAPFVSRRSLGIISGLTGAGGNVGAGLTQLLFFTSSQYSTGRGLEYMGIMIMACTLPVALVHFPQWGSMFFPASADATEEEYYASEWSEEEKAKGLHIAGQKFAENSRSERGRRNVILATSATPPNNTPQHV

SEQ ID NO: 1492 - DNA, 1741 bp, Hordeum vulgare
  CDS (87)..(1616)
ttacaagctccatctgagagcagcagcaaccaccattagagacacacttagttgccagtgcgactaagctagctagctcgaggaagatggaggtggagtcgagctcgcatggcgccggcgacgaggctgcgagcaagttctcgctgcccgtggactcggagcacaaggccaagtccatcaggctcttctccttcgccaacccccacatgcgcaccttccacctctcctggatctccttcttcacctgcttcgtctccaccttcgctgccgcgcccctcgtccctatcatccgcgacaacctaaacctcgccaaggccgacatcggcaacgccggtgtggcgtccgtgtccgggtctatcttctcgaggctcgccatgggggccatctgcgatctccttggccctcgatatggatgcgccttcctcgtcatgctcgcagcacccaccgtcttctgcatgtccctcatcgatgatgcggcgggctacatcacggtccgcttcctcatcggcttctccctcgcgacgtttgtgtcgtgccagtattggatgagcaccatgttcaacagcaagatcatcggcaccgtcaacggcctggcggccggctggggcaacatgggtggtggtgccacccagctcattatgccactcgtcttccacgccatccagaagtgtggtgccacgcccttcgtcgcatggcgcatcgcctacttcgtgccaggaatgatgcacgtggtgatgggcttgctcgtgctcaccatgggacaggatctccccgatggtaaccttgcaagcctccagaagaagggggagatggccaaggacaagttctccaaggttgtgtggggtgctgttacaaactaccgtacatggatcttcgttcttctttacggatactgcatgggtgttgagctcaccaccgacaacgtcatcgccgagtactacttcgaccactttcaccttgaccttcgaacatccggcaccattgccgcctgttttggcatggccaacatcgttgctcggcctgcgggtggctacctctccgacctcggtgcccgctacttcggcatgcgtgcccgcctctggaacatctggatcctccagaccgctggtggcgcattctgcctctggctcggccgtgcaaaagccctccccgaatccatcactgccatggtcctcttctccatctgcgctcaggcagcatgtggtgcagtctttggtgtcatccccttcgtctcccgccgctccctcggcatcatttcgggcttgagtggagccggtgggaactttggcgccgggctgacacaattgctcttcttcacttcgtcgaagtatggcaccggcagggggcttgagtacatgggtatcatgatcatggcctgcacgctccctgtggcgcttgtgcacttcccacagtggggttccatgctcttgccgccaaacgccaacgccaccgaggaggagttctatgccgccgaatggagcgaggaggagaagaagaagggtctccatatccctggccaaaagtttgccgagaattcccgctcggagcgtggcaggcgcaacgtcatccttgccacagccgccacaccccccaacaacactccccaacacgcataagactcgagcttttctttacctgtgtacacgtacagtgcgcgtattatacacacatcgatcgtgtatatacgcctggaatccgcaagcagtatgttttttgaaaaaaaaaaagcggccgcgaattc

SEQ ID NO: 1493 - protein, 509 aa, Hordeum vulgare
MEVESSSHGAGDEAASKFSLPVDSEHKAKSIRLFSFANPHMRTFHLSWISFFTCFVSTFAAAPLVPIIRDNLNLAKADIGNAGVASVSGSIFSRLAMGAICDLLGPRYGCAFLVMLAAPTVFCMSLIDDAAGYITVRFLIGFSLATFVSCQYWMSTMFNSKIIGTVNGLAAGWGNMGGGATQLIMPLVFHAIQKCGATPFVAWRIAYFVPGMMHVVMGLLVLTMGQDLPDGNLASLQKKGEMAKDKFSKVVWGAVTNYRTWIFVLLYGYCMGVELTTDNVIAEYYFDHFHLDLRTSGTIAACFGMANIVARPAGGYLSDLGARYFGMRARLWNIWILQTAGGAFCLWLGRAKALPESITAMVLFSICAQAACGAVFGVIPFVSRRSLGIISGLSGAGGNFGAGLTQLLFFTSSKYGTGRGLEYMGIMIMACTLPVALVHFPQWGSMLLPPNANATEEEFYAAEWSEEEKKKGLHIPGQKFAENSRSERGRRNVILATAATPPNNTPQHA

SEQ ID NO: 1494 - DNA, 1691 bp, Zea mays
  CDS (62)..(1636)
ccaagggaaagggatacatcacctgctgctctagctctgctatagcgctagcagcaatataatggcggccgtcggcgctccggggagctctctgcacggagtcacggggcgcgagccggcgttcgcattctccacggagcacgaggaggcggcgagcaatggcggcaagttcgacctgccggtggactcggagcacaaggcgaagagcgtccggctcttctccgtggcgaacccgcacatgcgcaccttccacctctcctggatctccttcttcacctgcttcgtgtccaccttcgccgccgcgccgctggtccccatcatccgcgacaacctcaacctcaccaaggccgacatcggcaacgcgggcgtggcctccgtgtcgggctccatcttctcccgcctcaccatgggcgccgtctgcgacctgctgggcccgcgctacggctgcgccttcctcatcatgctgtccgcgcccaccgtgttctgcatgtcgctcatcgacgacgccgcgggctacatcaccgtcaggttcctcatcggcttctccctcgccaccttcgtctcctgccagtactggatgagcaccatgttcagcagcaagatcatcggcaccgtcaacgggctcgccgccggatggggcaacatgggaggcggcgccacgcagctcatcatgccgctcgtctacgacgtcatccgcaagtgcggcgccacgcccttcacggcgtggcgcctcgcctacttcgtgccgggcctcatgcacgtcgtcatgggcgtcctggtgctcacgctggggcaggacctccccgacggcaacctcaggtcgctgcagaagaagggcaacgtcaacaaggacagcttctccaaggtcatgtggtacgccgtcatcaactaccgcacctggatcttcgtcctcctctacggctactgcatgggcgtcgagctcaccaccgacaacgtcatcgccgagtacatgtacgaccgcttcgacctcgacctccgcgtcgccgggaccatcgccgcctgcttcggcatggccaacatcgtcgcgcgccccatgggcggcatcatgtccgacatgggcgcgcgctactggggcatgcgcgctcgcctctggaacatctggatcctccagaccgccggcggcgccttctgcctctggctgggacgcgccagcaccctccccgtctccgtcgtcgccatggtgctcttctccttctgcgcgcaggcggcctgcggcgccatcttcggggtcatccccttcgtctcccgccgctccctcggcatcatctccggcatgacgggcgccggcggcaacttcggcgcggggctcacgcagctgctcttcttcacctcctcaacctactccacgggcagggggctagagtacatgggcatcatgatcatggcgtgcacgctacctgtggtgttcgtgcacttcccgcagtgggggtccatgttcttcccgcccagcgccaccgccgacgaggagggctactacgcctccgagtggaacgacgacgagaagagcaagggactccatagcgccagcctcaagtttgccgagaacagccgctcagagcgcggcaagcgaaacgtcatccaggccgatgccgccgccacgccggagcatgtctaagtctactactaataagatggatcgatccatcatccatgttcacctgctacctacc

SEQ ID NO: 1495 - protein, 524 aa, Zea mays
MAAVGAPGSSLHGVTGREPAFAFSTEHEEAASNGGKFDLPVDSEHKAKSVRLFSVANPHMRTFHLSWISFFTCFVSTFAAAPLVPIIRDNLNLTKADIGNAGVASVSGSIFSRLTMGAVCDLLGPRYGCAFLIMLSAPTVFCMSLIDDAAGYITVRFLIGFSLATFVSCQYWMSTMFSSKIIGTVNGLAAGWGNMGGGATQLIMPLVYDVIRKCGATPFTAWRLAYFVPGLMHVVMGVLVLTLGQDLPDGNLRSLQKKGNVNKDSFSKVMWYAVINYRTWIFVLLYGYCMGVELTTDNVIAEYMYDRFDLDLRVAGTIAACFGMANIVARPMGGIMSDMGARYWGMRARLWNIWILQTAGGAFCLWLGRASTLPVSVVAMVLFSFCAQAACGAIFGVIPFVSRRSLGIISGMTGAGGNFGAGLTQLLFFTSSTYSTGRGLEYMGIMIMACTLPVVFVHFPQWGSMFFPPSATADEEGYYASEWNDDEKSKGLHSASLKFAENSRSERGKRNVIQADAAATPEHV

SEQ ID NO: 1496 - DNA, 1527 bp, Populus tremula x Populus tremuloides
  CDS (1)..(1527)
atggagatagaagggcaagccactgtcaaggaatctcagcctccaaaattcgctcttccagtggattcagaacacaaggcaactgagttccggttgttctcagtagctgcccctcacatgcgggcattccatctttcttgggtttctttctttgcctgttttgtctcttcttttgctgctccaccccttcttcctatcatacgtgacaacctcaacctcactgcctctgacattggtaatgcgggcattgcatcagtgtcaggtgcagtttttgctcgagttgctatggggactgcttgtgaccttttcggaccccgtctagcctctgcctcattgatcctcctcactgcacctgcagtttacttcacttccatggcctcatcttctacttcttttctcctggttcgttttttcactggcttctctctggccacttttgtctccactcaattctggatgagctctatgttttcagcaccggtagttggaacggctaatggcgttgcgggaggttggggtaaccttggcggtggggcaacgcaactaatcatgccccttgtgtttggcctcatccgtgacattggagccatcaaatttacagcttggagaattgcgtttttcattcctgccctgtttcagacactatcggcatttgcagtcttgatctttggcaaggacttgccggacggaaactttaggcggctgcagaaagcaggggataaaacaaaagataaattctcaaatgtcttctatcatggaataaaaaattacagagggtggatcctggcactcagttatgggtactgttttggggtagagctgacaatagacaacattgtcgcagaatacttctatgacagatttgacctcaaactccatacagcaggaatgattgcagcaagctttggtctagcaaacattgtttctcgaccaggtggtggaatgatctcagatgcagtagggaagaggtttggaatgagggggaagttgtgggctctgtgggtagtgcagaccttgggaggtgttttctgcatcatacttggacgagttggatctttaggcgcgtccattgtggtgatgattgtgttcttcttattctgccaagcagcatgtggactaacatttggggtggtgccttttgtctcacgaaggtcattggggctcatatctggtatgactggaggtggtggaaacgtgggggcagttctaactcaactaattttcttcagaggatcgaaatactcaaaagagagagggataatgctcatgggtgtcatgattatatgctgcactcttccaatttgtcttatacacttcccacaatggggtggaatgttttgcggtccatcatctacaaagatcgctacagaagaagactactacttgtccgaatggaattcagaggagaaggagaaaggcctgcatctatcaagcttaaagtttgcagataacagcagaagtgaaagaggtagaaaagaagattctgaaaccaggccagtagatgaaaccctatcaacaaaagtctag

SEQ ID NO: 1497 - protein, 508 aa, Populus tremula x Populus tremuloides
MEIEGQATVKESQPPKFALPVDSEHKATEFRLFSVAAPHMRAFHLSWVSFFACFVSSFAAPPLLPIIRDNLNLTASDIGNAGIASVSGAVFARVAMGTACDLFGPRLASASLILLTAPAVYFTSMASSSTSFLLVRFFTGFSLATFVSTQFWMSSMFSAPVVGTANGVAGGWGNLGGGATQLIMPLVFGLIRDIGAIKFTAWRIAFFIPALFQTLSAFAVLIFGKDLPDGNFRRLQKAGDKTKDKFSNVFYHGIKNYRGWILALSYGYCFGVELTIDNIVAEYFYDRFDLKLHTAGMIAASFGLANIVSRPGGGMISDAVGKRFGMRGKLWALWVVQTLGGVFCIILGRVGSLGASIVVMIVFFLFCQAACGLTFGVVPFVSRRSLGLISGMTGGGGNVGAVLTQLIFFRGSKYSKERGIMLMGVMIICCTLPICLIHFPQWGGMFCGPSSTKIATEEDYYLSEWNSEEKEKGLHLSSLKFADNSRSERGRKEDSETRPVDETLSTKV

SEQ ID NO: 1498 - DNA, 2000 bp, Oryza sativa
  CDS (224)..(1684)
gagcgccggcctcccaccggtcgcgtaagatcacgcccgaaatctttattcattttctctccaccggttgccctctcgccgcacccaaccatcgcgccacgccgcgccgcgctgccggagccgcgctttccgctatgctataagagctgacgcgcagggcacagcggatgtacgtacacacagtcactagctaagctgctagccttgctaccacgtgttggagatggaggctaagccggtggcgatggaggtggagggggtcgaggcggcggggggcaagccgcggttcaggatgccggtggactccgacctcaaggcgacggagttctggctcttctccttcgcgaggccacacatggcctccttccacatggcgtggttctccttcttctgctgcttcgtgtccacgttcgccgtgttcgcgcgtctggccatgggcacggcgtgcgacctggtcgggcccaggctggcctccgcgtctctgatcctcctcaccacaccggcggtgtactgctcctccatcatccagtccccgtcggggtacctcctcgtgcgcttcttcacgggcatctcgctggcgtcgttcgtgtcggcgcagttctggatgagctccatgttctcggcccccaaagtggggctggccaacggcgtggccggcggctggggcaacctcggcggcggcgccgtccagctgctcatgccgctcgtgtacgaggccatccacaagatcggtagcacgccgttcacggcgtggcgcatcgccttcttcatcccgggcctgatgcagacgttctcggccatcgccgtgctggcgttcgggcaggacatgcccggcggcaactacgggaagctccacaagactggcgacatgcacaaggacagcttcggcaacgtgctgcgccacgccctcaccaactaccgcggctggatcctggcgctcacctacggctacagcttcggcgtcgagctcaccatcgacaacgtcgtgcaccagtacttctacgaccgcttcgacgtcaacctccagaccgccgggctcatcgccgccagcttcgggatggccaacatcatctcccgccccggcggcgggctactctccgactggctctccagccggtacggcatgcgcggcaggctgtgggggctgtggactgtgcagaccatcggcggcgtcctctgcgtggtgctcggaatcgtcgacttctccttcgccgcgtccgtcgccgtgatggtgctcttctccttcttcgtccaggccgcgtgcgggctcaccttcggcatcgtgccgttcgtgtcgcggaggtcgctggggctcatctccgggatgaccggcggcgggggcaacgtgggcgccgtgctgacgcagtacatcttcttccacggcacaaagtacaagacggagaccgggatcaagtacatggggctcatgatcatcgcgtgcacgctgcccgtcatgctcatctacttcccgcagtggggcggcatgctcgtaggcccgaggaagggggccacggcggaggagtactacagccgggagtggtcggatcacgagcgcgagaagggtttcaacgcggccagcgtgcggttcgcggagaacagcgtgcgcgagggcgggaggtcgtcggcgaatggcggacagcccaggcacaccgtccccgtcgacgcgtcgccggccggggtgtgaagaatgccacggacaataaggtcgcggttgtagtacaactgtacaaattgatggtacgtgtcgtttgaccgcgcgcgcgcacagtgtgggtcgtggcctcgtgggcttagtggagtacagtgaggggtgtacgtgtgtcgtggcgcgcgcggtcacctcggtggccttgggattgggggggcactatacgctagtactccagatatatacgggtttgatttacttctgtggatcggcgcttgttggtggtttgctccctgtggtttttgtgatggtaatcatactcatactcaaacagtcaaaactttttgatgcg

SEQ ID NO: 1499 - protein, 486 aa, Oryza sativa
MEAKPVAMEVEGVEAAGGKPRFRMPVDSDLKATEFWLFSFARPHMASFHMAWFSFFCCFVSTFAVFARLAMGTACDLVGPRLASASLILLTTPAVYCSSIIQSPSGYLLVRFFTGISLASFVSAQFWMSSMFSAPKVGLANGVAGGWGNLGGGAVQLLMPLVYEAIHKIGSTPFTAWRIAFFIPGLMQTFSAIAVLAFGQDMPGGNYGKLHKTGDMHKDSFGNVLRHALTNYRGWILALTYGYSFGVELTIDNVVHQYFYDRFDVNLQTAGLIAASFGMANIISRPGGGLLSDWLSSRYGMRGRLWGLWTVQTIGGVLCVVLGIVDFSFAASVAVMVLFSFFVQAACGLTFGIVPFVSRRSLGLISGMTGGGGNVGAVLTQYIFFHGTKYKTETGIKYMGLMIIACTLPVMLIYFPQWGGMLVGPRKGATAEEYYSREWSDHEREKGFNAASVRFAENSVREGGRSSANGGQPRHTVPVDASPAGV

SEQ ID NO: 1500 - DNA, 1650 bp, Physcomitrella patens
  CDS (1)..(1650)
atggcagaccagacaacatcggcggtgggacatgggggaaggactgttcccggcatgtccatgcacggtgtgacaggaaaagagcctgtgtatgcattctcagtgattcaaggaactgtagaggaccccgacgctgagaagtttgcgctcccggtggactctgagcacaaggcgaaaacaatccgagtttacagtttcgcaaagccacacatgcgcgcctttcatctcgcttgggtgtctttctttacatgtttcttggcaaccttcgcgtcgccgcccctgatgccgatcatccgtgacaacttgaatttgaccaaaaccgacgttggacatgctgccatcgcctcagtatctggttctatcctgtctcgtctgctgatgggaaccgtgtgcgacgtggttggaccccgatatggctgtgcattcctgattatgataatttcgccagccgtgtactcaatggctcttgtttcagatgccgcgagctttataatagtccgattctttaccggtttcgctctagccaccttcgtctcttgccaattttggatgagctccatgttcaacagcaagatcgtcggcacagctaatgggctggccgcgggttggggcaacctcggtggtggcgctactcagctcatcatgcctctggttttcgcgttaatccgagacagcttcaactctacaccgttcgttgcatggcgcctggcctttttcttacccggagcgatgcagacaattatggggctcctcgttctatttctcggccaagatcttcccgacggcaactattctcagttgcagaaacaaggcgtcaaagtgaaagatagctttctaaaggtcttgatgtacgcaattacaaattacagaacatgggtgttctttctgttgtatggattcaccttcggcgttgagctgacagtcaacaacaacatcgctgagtacttctatgaccgcttcgatttgaatctctccacagctggaataatcgcttcattattcggcttgatgaactttttcgctcgtccaagtggtggaatcatctccgatactgttgcgcgccgttttggaatgaaaggtcgcctgtgcacgctgtggatatgccattcacttggggcagtcttctgcattgtgcttgggaggatggacagtttgactgccgccatagccgtcttgatcgtcttcgcggttttcatccaggcttctagcggggctgtttttggcataatcccttttatctcacggagatcacttggtgtgatttcgggattcactggcgcaggagggaatgtaggctccgtggtactgcaaacagtattcttcacatcgggttcgtatcgaaccgaagaaggcatccagttcatgggtgtgatggtcatctgtgtcgccgcgctaacagtatttatctatttcccccagtggggagggatcttctttcctccatccaaaagcaccgaagaagattactacgcctccgagtggagtgccgaggagcaggagcaagggaagcatgcaacaagcatgaaattcgcctctaatgcgagaagcgagcgtggaaagagaggtctgaattctcccgatttgaccatccatcccgttactgattccaaggccaccccagtttctgacgttgagctcaacaaagtgtaa

SEQ ID NO: 1501 - protein, 549 aa, Physcomitrella patens
MADQTTSAVGHGGRTVPGMSMHGVTGKEPVYAFSVIQGTVEDPDAEKFALPVDSEHKAKTIRVYSFAKPHMRAFHLAWVSFFTCFLATFASPPLMPIIRDNLNLTKTDVGHAAIASVSGSILSRLLMGTVCDVVGPRYGCAFLIMIISPAVYSMALVSDAASFIIVRFFTGFALATFVSCQFWMSSMFNSKIVGTANGLAAGWGNLGGGATQLIMPLVFALIRDSFNSTPFVAWRLAFFLPGAMQTIMGLLVLFLGQDLPDGNYSQLQKQGVKVKDSFLKVLMYAITNYRTWVFFLLYGFTFGVELTVNNNIAEYFYDRFDLNLSTAGIIASLFGLMNFFARPSGGIISDTVARRFGMKGRLCTLWICHSLGAVFCIVLGRMDSLTAAIAVLIVFAVFIQASSGAVFGIIPFISRRSLGVISGFTGAGGNVGSVVLQTVFFTSGSYRTEEGIQFMGVMVICVAALTVFIYFPQWGGIFFPPSKSTEEDYYASEWSAEEQEQGKHATSMKFASNARSERGKRGLNSPDLTIHPVTDSKATPVSDVELNKV

SEQ ID NO: 1502 - DNA, 1838 bp, Nicotiana tabacum
  CDS (19)..(1611)
ttaaagaagaaattaaaaatggttgatattgaaggatcaccaggtagttctatgcatggagttacaggtagagaaccagttcttgctttctctgttgcatctccaatggtacaaactgataccactgcacattttaaagttccggtcgattctgaacacaaggccaaggttttcaaattctactcattttcaaaacctcacggtctaacttttcaactttcttggatttctttctttacttgttttgtttctacttttgctgctgcccctttagttcctattattagagacaaccttaacttgaccaaaatggacgttggtaatgctggggttgcctctgtttccggaagtattctatctaggcttgcaatgggtgcgatttgtgacatgttgggaccaagatatggatgcgcgtttcttatcatgttatcagctccgactgttttttgcatgtctttcgtgtcttcggctggtggctacgttgctgtgagattcatgattggattctcactcgcgacgtttgtgtcgtgtcaatattggatgagtacgatgtttaatagtcagattattggacttgttaatggaacagcagcaggatggggaaatatggggggtggagctactcagcttattatgcctattctctatgatattattagaagagcaggagccaccccttttactgcttggagaattgctttctttattcctggttggcttcatgttattatgggaattttagtgttaactcttggccaagatttgcctgatggtaaccttgcttccctacagaagaaaggcgatgtttctaaagataagttctctaagatattgtggtatgctgcaacaaattacaggacatggatctttgtcctgctctatggttactccatgggagttgaattgactacagataatgtgattgctgagtacttctttgatagatttgatctaaagcttcacacggctggaatcattgctgccacatttggtatggctaatctcttagctcgaccttttggaggatggtcatcagatattgcagccaaacattttggaatgagaggcagattatggaacttatggattttacaaacacttggtggtgttttctgtttcttacttggaaaagcaaacacacttcctatggctatagcttggatgatcatattctccttaggtgctcaagcagcatgtggagctacatttggtattattcctttcatttcgcgtcgatcgttaggtataatctcaggtatgacaggagctggaggaaattttggttctggattgacacaactcttgtttttcacaactacaaaatggtcaacagaaacaggattgagttatatggggattatgattatagcttgtacacttcctgtatctttggttcatttcccacaatggggaagtatgtttttgcctccaactaaagatcctgttaagagtactgaagagcattacttcacgtctgagtacactgaggctgagaagcaaaagggtatgcaccaaaacagcatcaagtttgctgaaaactgtcggtcggagcgtggtaagcgtgtgggttcagctcttactccgcctaatgtaacgccaaaccgtgtctgagcttgagtctcacggatcagtacggagaaatagtgattttgaaaagcttacttgcttaattggtgtttgtatcaacacaataaacgtgtgatatgtgtcttttaatgagctttatattacccaagtgtgagtagttaatttgtattatcactttgtgttgtgagactgatcttaatattaaaacagttgatttggtgtaaactttcattaaaaaaaaaaaaaaaaaa

SEQ ID NO: 1503 - protein, 530 aa, Nicotiana tabacum
MVDIEGSPGSSMHGVTGREPVLAFSVASPMVQTDTTAHFKVPVDSEHKAKVFKFYSFSKPHGLTFQLSWISFFTCFVSTFAAAPLVPIIRDNLNLTKMDVGNAGVASVSGSILSRLAMGAICDMLGPRYGCAFLIMLSAPTVFCMSFVSSAGGYVAVRFMIGFSLATFVSCQYWMSTMFNSQIIGLVNGTAAGWGNMGGGATQLIMPILYDIIRRAGATPFTAWRIAFFIPGWLHVIMGILVLTLGQDLPDGNLASLQKKGDVSKDKFSKILWYAATNYRTWIFVLLYGYSMGVELTTDNVIAEYFFDRFDLKLHTAGIIAATFGMANLLARPFGGWSSDIAAKHFGMRGRLWNLWILQTLGGVFCFLLGKANTLPMAIAWMIIFSLGAQAACGATFGIIPFISRRSLGIISGMTGAGGNFGSGLTQLLFFTTTKWSTETGLSYMGIMIIACTLPVSLVHFPQWGSMFLPPTKDPVKSTEEHYFTSEYTEAEKQKGMHQNSIKFAENCRSERGKRVGSALTPPNVTPNRV

SEQ ID NO: 1504 - DNA, 1611 bp, Nicotiana tabacum
  CDS (12)..(1604)
ttaaaaaaaaaatgggtgatattgagggcgaaccagggagttccatgcatggagtcactggtagagagccagttcttgctttctcagtggcttctccgatggtgccaactgataccactgcaaaattttcagtaccagttgatactgaacacaaagccaagatttttaagttctattcattttcaaagccacatggtcttactttccagctctcctggatttctttcttcacttgttttgtttcaacttttgccgctgcccctttagttcctatcattagggacaaccttaatttaaccaaaatggatgttggtaatgccggagttgcttccgtttccggaagtattttatctaggcttgttatgggtgcagtttgtgatatgttagggccaagatatggctgtgcatttctgattatgttgtcagccccaactgtattttgcatgtcatttgtgtcgtcggctggaggatatgttgctgtccggttcatgatcggattctcgctagcaacatttgtgtcgtgccaatattggatgagtactatgtttaatagtcagattataggacttgtcaatgggacagctgcaggatggggaaatatgggtggtggtgcgactcaacttattatgccaattgtgtatgatataataagaagagcaggagcaactccattcactgcttggagaattgcatttttcattcctggctggcttcatattgtgatgggtattttggtgttgactcttggccaagatttgcctgatgggaaccgtggtgatttacagaagaagggtgatgtttctaaagataaattctccaacatattgtggtacgctgcaacaaactacaggacgtggatctttgttcttctctacggatactctatgggagttgaactgtctacagacaacgtaattgcggagtacttcttcgacagatttgatctaaagcttcacacagcgggaattattgcagcgacctttggtatggctaatttattagctcgtccattcggaggattttcttcagattacgcagccaaaagattcggcatgagaggcagactttgggtcctttggatattacaaacactgggaggagtattctgcgtcctgttgggccgttcaaatcctctgcccatagccgtcacattcatgatccttttctctattggtgctcaagctgcatgtggtgcaacattcggtattattccattcatttctcgccgatccttaggtataatctcaggaatgactggggctggaggaaatttcggttctggattgacacaactgttgttcttcacgagctcaaaatactcgacagcaacagggctaacttacatgggactaatgatcataggatgcactcttccagtgactttctgtcatttcccacaatggggaagtatgtttttcccaccaacgaaagaccctgttaagggaagtgaggaacattattatgccgcagagtataccgaagctgagaggcagaaaggtatgcaccaaaacagcttgaagttcgccgagaactgccgatcggagcgtggcaagcgcgtgggatcggcacctactcctccaaatttaacgcctaatcgtgtctgagatcccg

SEQ ID NO: 1505 - protein, 530 aa, Nicotiana tabacum
MGDIEGEPGSSMHGVTGREPVLAFSVASPMVPTDTTAKFSVPVDTEHKAKIFKFYSFSKPHGLTFQLSWISFFTCFVSTFAAAPLVPIIRDNLNLTKMDVGNAGVASVSGSILSRLVMGAVCDMLGPRYGCAFLIMLSAPTVFCMSFVSSAGGYVAVRFMIGFSLATFVSCQYWMSTMFNSQIIGLVNGTAAGWGNMGGGATQLIMPIVYDIIRRAGATPFTAWRIAFFIPGWLHIVMGILVLTLGQDLPDGNRGDLQKKGDVSKDKFSNILWYAATNYRTWIFVLLYGYSMGVELSTDNVIAEYFFDRFDLKLHTAGIIAATFGMANLLARPFGGFSSDYAAKRFGMRGRLWVLWILQTLGGVFCVLLGRSNPLPIAVTFMILFSIGAQAACGATFGIIPFISRRSLGIISGMTGAGGNFGSGLTQLLFFTSSKYSTATGLTYMGLMIIGCTLPVTFCHFPQWGSMFFPPTKDPVKGSEEHYYAAEYTEAERQKGMHQNSLKFAENCRSERGKRVGSAPTPPNLTPNRV

SEQ ID NO: 1506 - DNA, 1789 bp, Zea mays
  CDS (70)..(1644)
acgcggggaagcacaagcaaccagccagctagtttccaagggatcacctgctctctagcactagcagcaatggcggccgtcggcgctccgggcagctctctgcacggagtcacggggcgcgagccggcgttcgccttctccacggagcacgaggaggcggcgagcaatggtggcaagttcgacctgccggtggactcagagcacaaggcgaagagcgtccgtctcttctccgtggcgaacccacacatgcgcaccttccacctctcctggatctccttcttcacctgcttcgtgtccaccttcgccgccgcgccgctggtccccatcatccgcgacaacctcaacctcaccaaggccgacatcggcaacgcgggcgtggcctcggtgtcgggctccatcttctcccgcctcaccatgggcgccgtctgcgacctgctgggcccgcgctacggctgcgccttcctcatcatgctgtccgcgcccaccgtgttctgcatgtcgctcatcgacgacgccgcgggctacatcaccgtcaggttcctcatcggcttctccctcgccaccttcgtctcctgccagtactggatgagcaccatgttcagcagcaagatcatcggcaccgtcaacgggctcgccgccggatggggcacaatgggaaggcggcgccacgcagctcatatgccgctcgtctacgacgtcatccgcaagtgcggcgccacgccattcacggcctggcgcctcgcctacttcgtgccgggcctcatgcacgtcgtcatgggcgtcctggtgctcacgctggggcaggacctccccgacggcaacctcaggtcgctgcagaagaagggcaacgtcaacaaggacagcttctccaaggtcatgtggtacgccgtcatcaactaccgtacctggatctttgtcctcctctacggctactgcatgggcgtcgagctcaccaccgacaacgtcatcgccgagtacatgtacgaccgcttcgacctcgacctccgcgtcgctgggaccatcgccgcctgcttcggcatggccaacatcgtcgcacgccccatgggcggcatcatgtccgacatgggcgcgcgctactggggcatgcgcgctcgcctctggaacatctggatcctccagaccgccggcggcgccttctgcctctggctggggcgcgccagcaccctccccgtctccgtcgtcgccatggtgctcttctccttctgcgcgcaggcggcatgcggcgccatcttcggggttatcccctttgtctcccgccgctccctcggcatcatctccggcatgacgggcgccggcggcaacttcggcgccgggctcacgcagctgctcttctttacctcctcgacctactccacgggcagggggctggagtacatgggcatcatgatcatggcgtgcacgctgcccgtggtgttcgtgcacttccctcagtgggggtccatgttctttccgcccagcgccaccgccgacgaggagggctactacgcctccgagtggaacgacgacgagaagagcaagggactccatagcgccagcctcaagttcgccgagaacagccgctcagagcgcggcaagcgaaacgtcatccaggccgacgccgccgccacgccggagcatgtctaagtctactactaagatggatcgatcgacgatcacctatacctctttgtatgtacgaatatgccttgttattactgcgcgcgcgcatatacaatacacgtgtgctccgttgacatgagttagaaaaaaaaaaaaaaaaaaaaaaaaa

SEQ ID NO: 1507 - protein, 524 aa, Zea mays
MAAVGAPGSSLHGVTGREPAFAFSTEHEEAASNGGKFDLPVDSEHKAKSVRLFSVANPHMRTFHLSWISFFTCFVSTFAAAPLVPIIRDNLNLTKADIGNAGVASVSGSIFSRLTMGAVCDLLGPRYGCAFLIMLSAPTVFCMSLIDDAAGYITVRFLIGFSLATFVSCQYWMSTMFSSKIIGTVNGLAAGWGTMGRRRHAAHMPLVYDVIRKCGATPFTAWRLAYFVPGLMHVVMGVLVLTLGQDLPDGNLRSLQKKGNVNKDSFSKVMWYAVINYRTWIFVLLYGYCMGVELTTDNVIAEYMYDRFDLDLRVAGTIAACFGMANIVARPMGGIMSDMGARYWGMRARLWNIWILQTAGGAFCLWLGRASTLPVSVVAMVLFSFCAQAACGAIFGVIPFVSRRSLGIISGMTGAGGNFGAGLTQLLFFTSSTYSTGRGLEYMGIMIMACTLPVVFVHFPQWGSMFFPPSATADEEGYYASEWNDDEKSKGLHSASLKFAENSRSERGKRNVIQADAAATPEHV

SEQ ID NO: 1508 - DNA, 1646 bp, Lycopersicon esculentum
  CDS (8)..(1603)
gcctaaaatgggtgatattgaaggatcaccaggaagttcaatgcatggtgttactggtagagagccagttcttgcattttcagttgcttcactaattgtaccaactgatacatcagccaatttcaaagtccctgttgattctgaacataaagctaaagtttttaaattttattcgttttcgaaacctcatggactaacgtttcaactctcatggatttcattttgtacttgtttcgtatcgacttttgctgcagcccctttagtccctattattagggacaatcttaatctaactaaaatggatgttggtaatgctggagttgcctctgtttcgggtagtatcttgtctaggctagctatgggcgcgatttgtgacatgttaggtcctagatatggttgcgcgttccttataatgttatcagccccaactgttttatgtatgtcttttgtgtcatcggctggagggtacgttgctgtgaggtttatgattgggttttcactagcaacgtttgtgtcatgtcagtattggatgagtacgatgtttaatagtcaaatcattggacttgtgaatggtacagctgctggatggggtaatatgggtggtggtgctactcaacttattatgcctttgctctacgatataatacgtagagcaggggcaaccccgttcactgcttggagaatcgcattttttattcctggatggcttcatgttattatgggaattttagttttaactcttggacaagatttacctgatggtaacctcgcttctttacagaagaaaggcgatgtttctaaagataaattctcaaagatattatggtatgctgcaacaaattacagaacatggatccttgttctgctctatggatactcaatgggagttgaattaactacagataacgtgattgctgagtatttcttcgatagatttgatttgaagcttcatacggctggaatcatcgctgcaacatttggcatggctaacttattagcgcgaccatttggaggatggtcatcagatgttgcagctaaacatttcgggatgagaggcagattatggaattcatggattttacaaacacttggtggtgtgttctgtttactacttggaagggctactacacttcctctggctattacttggatgatcatattctcaataggtgcacaagcagcatgtggtgtaacgtttggaattattccctttatttcgcgaagatcattaggtataatatcaggtatgacaggagctggaggcaattttggttccggattgacacaactactgtttttcacgagtacaaagtactcgacaggaacaggactaacgtatatggggatgatgatcatcgcgtgtacacttccagtaatgttagttcgttttccacagtggggtagtatgtttttgcctccatctaaagatcctattaagggtactgaagaacattattttggttctgagtatactgaggatgagaaacaaaagggaatgcaccagaacagcatcaagttcgcggaaaacagcaggacagagcgtgggaagaagcgcgttggttcagcacctactccgcctaatgtaacaccaaatcgcgtctgatggggaaaaaaattaaaatacttacttcgcagttcatgctcgt

SEQ ID NO: 1509 - protein, 531 aa, Lycopersicon esculentum
MGDIEGSPGSSMHGVTGREPVLAFSVASLIVPTDTSANFKVPVDSEHKAKVFKFYSFSKPHGLTFQLSWISFCTCFVSTFAAAPLVPIIRDNLNLTKMDVGNAGVASVSGSILSRLAMGAICDMLGPRYGCAFLIMLSAPTVLCMSFVSSAGGYVAVRFMIGFSLATFVSCQYWMSTMFNSQIIGLVNGTAAGWGNMGGGATQLIMPLLYDIIRRAGATPFTAWRIAFFIPGWLHVIMGILVLTLGQDLPDGNLASLQKKGDVSKDKFSKILWYAATNYRTWILVLLYGYSMGVELTTDNVIAEYFFDRFDLKLHTAGIIAATFGMANLLARPFGGWSSDVAAKHFGMRGRLWNSWILQTLGGVFCLLLGRATTLPLAITWMIIFSIGAQAACGVTFGIIPFISRRSLGIISGMTGAGGNFGSGLTQLLFFTSTKYSTGTGLTYMGMMIIACTLPVMLVRFPQWGSMFLPPSKDPIKGTEEHYFGSEYTEDEKQKGMHQNSIKFAENSRTERGKKRVGSAPTPPNVTPNRV

SEQ ID NO: 1510 - DNA, 1744 bp, Triticum aestivum
  CDS (63)..(1586)
gcagtataatcaagcaagctagctgcaagccgaggagcctagctcgatcaagcaaggtcgaaatggaggtggagtctagcgcccatggcgacgccgcggcgagcaagttcacgctgcctgtggactccgagcacaaggccaagtccttcaggctcttctccttcgccaacccccacatgcgcaccttccacctctcctggatatccttcttcacctgctttgtctccaccttcgccgccgcgccgttggtgcccatcatccgtgacaacctcaacctcgccaaggccgacatagggaatgccggtgtggcatctgtgtcagggtccatcttctccaggcttgccatgggcgccgtctgcgaccttttggggccgcggtatggctgtgccttcctcgtcatgctctcagcgccaacggtcttctgcatggccgtcatcgatgacgcctcggggtacatcgctgtacgcttcctcattggcttctccctcgccgcctttgtgtcctgccaatactggatgagcaccatgttcaacagtaagatcattggcacggtgaatggcctcgcggccggctggggcaacatggggggcggtgccacacaactcattatgccacttgttttccatgccatccaaaagtgcggtgccacacccttcgtggcatggcgtatcgcctacttcgtgccgggaatgatgcacatcgtcatggggttgcttgtcctcacaatgggccaagatctccccgacggcaaccttgcgagcctccagaagaagggagacatggccaaggacaagttctccaaggtcctttggggcgccgtcaccaactaccggacatggatcttcgtcctcctctacggctactgcatgggtgtcgagctcaccactgacaacgtcatcgccgagtactactacgaccatttccacctacaccttcgcgctgcaggcaccatcgccgcctgctttggcatggccaatatcgtcgcacgtcctatgggaggttacctctctgaccttggcgctcgctactttggtatgcgtgctcgcctatggaacatctggatcctccagaccgccggcggcgctttctgcatctggctcggtcgtgcatcggccctccccgcctcagtgactgccatggttctcttctccatctgcgcccaagctgcatgtggcgctgtctttggtgttgcaccattcgtttccaggcgttcccttggcatcatctctgggttaaccggcgctggtggcaatgtgggcgcggggctcacacaacttctcttcttcacttcgtcgcaatactccaccgggaggggtctcgagtacatgggcatcatgatcatggcatgcacattacctatcactctggtgcacttcccacaatggggctccatgttcttcccggccagtgctgatgctacggaggaggagtactacgcttccgagtggtcagaggaggagaagggcaagggtctccatatcgcaggccagaagtttgcagagaactcccgctcggagcgtggtaggcgcaatgttatcctcgccacatccgccacgccgcccaacaatacaccccagcatgtataaggcccttgttttctgtcacctatgaattgtacggttcgtcacgtacatatacaaaccgtatatctacgtcggcagccccagcgtaataagttgtatggggatttatctttctactagtaaacttaaggaaacgctggttttgcgttcctgctctgtac

SEQ ID NO: 1511 - protein, 507 aa, Triticum aestivum
MEVESSAHGDAAASKFTLPVDSEHKAKSFRLFSFANPHMRTFHLSWISFFTCFVSTFAAAPLVPIIRDNLNLAKADIGNAGVASVSGSIFSRLAMGAVCDLLGPRYGCAFLVMLSAPTVFCMAVIDDASGYIAVRFLIGFSLAAFVSCQYWMSTMFNSKIIGTVNGLAAGWGNMGGGATQLIMPLVFHAIQKCGATPFVAWRIAYFVPGMMHIVMGLLVLTMGQDLPDGNLASLQKKGDMAKDKFSKVLWGAVTNYRTWIFVLLYGYCMGVELTTDNVIAEYYYDHFHLHLRAAGTIAACFGMANIVARPMGGYLSDLGARYFGMRARLWNIWILQTAGGAFCIWLGRASALPASVTAMVLFSICAQAACGAVFGVAPFVSRRSLGIISGLTGAGGNVGAGLTQLLFFTSSQYSTGRGLEYMGIMIMACTLPITLVHFPQWGSMFFPASADATEEEYYASEWSEEEKGKGLHIAGQKFAENSRSERGRRNVILATSATPPNNTPQHV

SEQ ID NO: 1512 - DNA, 1750 bp, Triticum aestivum
  CDS (35)..(1558)
  misc_feature (739)..(739): r is g or a
  misc_feature (790)..(790): y is t or c
  misc_feature (844)..(844): y is t or c
  misc_feature (859)..(859): s is g or c
  misc_feature (913)..(913): y is t or c
  misc_feature (916)..(916): w is a or t
  misc_feature (928)..(928): y is t or c
  misc_feature (934)..(934): y is t or c
  misc_feature (937)..(937): y is t or c
  misc_feature (952)..(952): y is t or c
  misc_feature (970)..(970): k is g or t
  misc_feature (982)..(982): y is t or c
  misc_feature (1039)..(1039): m is a or c
  misc_feature (1045)..(1045): y is t or c
  misc_feature (1201)..(1201): n is a, g, c or t
  misc_feature (1234)..(1234): r is g or a
  misc_feature (1279)..(1279): y is t or c
tagttttgagtgcaactaggctagctcaagaaagatggaggtgcaggccggctctcatgccgacgccgcggcgagcaagttcacgctgccggtggactccgagcacaaggccaagtccttcaggctcttctccttcgccaacccccacatgcgcacctttcacctctcgtggatctccttcttcacctgcttcgtctccacctttgctgcggcgcccctcgtgcccatcatccgcgacaacctcaaccttgccaaggctgacatcggcaatgccggtgtcgcgtccgtgtctgggtccatcttctccaggctggccatgggcgctatctgtgacttgcttggcccacggtatggttgtgccttcctcgtcatgctctcggcaccgaccgtcttctgcatggccgtcatcgatgatgcctcagggtacatcgccgtccggttcctcattggcttctccctcgccaccttcgtgtcatgccaatactggatgagcaccatgttcaatagcaagatcattggcacggtcaatggcttggctgcaggctggggcaacatgggtggcggcgccacgcagctcatcatgccgcttgtcttccacgcaatccagaagtgtggcgccacgcccttcgtggcatggcgtattgcctacttcgtgccgggaatgatgcacatcgtgatgggcttgctggtcctcaccatggggcaagatctccctgacgggaaccttgcgagcctccaraagaagggagacatggccaaggacaagttctccaaggtcctttggggcgcygtcaccaactaccggacatggatcttcgtcctcctctacggctactgcatgggygtcgagctcaccacsgacaatgtcatcgccgagtactactacgaccacttccacctagacctccgcgcygcwggcaccattgcygcttgyttyggcatggcaaacatygtcgcgcgtcctatgggkggctacctctcygaccttggtgcccgctactttggcatgcgtgctcgcctttggaacatctggatcctmcaaacygccggtggcgctttctgcatctggctcggtcgtgcgtcagccctccctgcctcagtgactgccatggttctcttctccatctgcgcccaagccgcgtgtggtgctgtatttggcgtcgcacccttcgtttctagacgttcccttggcatcatctcngggctgaccggtgctggtggaaacgtgggtgcrgggctcacgcagcttctcttctttacttcatcacaatactccacyggaaggggtctcgagtacatgggcatcatgatcatggcatgcacgctgcctgtcgctcttgtgcacttcccacagtggggctcgatgttcttcccggccagcgccgacgccacagaggaggaatactatgcctctgagtggtcggaggaggagaagaacaagggtctccatattgctggccaaaagtttgccgagaactcacgatcggagcgtggaaggcgcaacgtcatccttgccacgtccgccacgccacccaacaatacgccccagcacgtataagaccggattgtttttcatatactatgtacaagtactgaacatcggctgtaataaggtgtacgcatttatatttccagtgtagacttgtgtaatgcgtttcttacgcacgaaatgttttggtgtgtgcatgcacgcatgcgaggtacctgtggtctgaatttacagcaactttgagactaaaaaaaaaaaaaa

SEQ ID NO: 1513 - protein, 507 aa, Triticum aestivum
MEVQAGSHADAAASKFTLPVDSEHKAKSFRLFSFANPHMRTFHLSWISFFTCFVSTFAAAPLVPIIRDNLNLAKADIGNAGVASVSGSIFSRLAMGAICDLLGPRYGCAFLVMLSAPTVFCMAVIDDASGYIAVRFLIGFSLATFVSCQYWMSTMFNSKIIGTVNGLAAGWGNMGGGATQLIMPLVFHAIQKCGATPFVAWRIAYFVPGMMHIVMGLLVLTMGQDLPDGNLASLQKKGDMAKDKFSKVLWGAVTNYRTWIFVLLYGYCMGVELTTDNVIAEYYYDHFHLDLRAAGTIAACFGMANIVARPMGGYLSDLGARYFGMRARLWNIWILQTAGGAFCIWLGRASALPASVTAMVLFSICAQAACGAVFGVAPFVSRRSLGIISGLTGAGGNVGAGLTQLLFFTSSQYSTGRGLEYMGIMIMACTLPVALVHFPQWGSMFFPASADATEEEYYASEWSEEEKNKGLHIAGQKFAENSRSERGRRNVILATSATPPNNTPQHV

SEQ ID NO: 1514 - DNA, 1832 bp, Brassica napus
  CDS (37)..(1629)
cacattcttgtgaaagaacttaaacattttgcatcaatgggtgattctactggcgagccgggaagctccatgcatggagtgaccggtagagaacaaacatttgctttctcggtggcttcaccgattgtcccaaccgacaagacagcaaagttcgacctgccggtggactcggagcataaggcaacggttttcaagctcttctccttcgccaaacctcacatgcgaacgttccatctctcgtggatctctttctccacgtgttttgtctcgacgtttgcggctgcaccacttgtccccatcatccgagagaatctcaacctcacgaaacaagacatcggtaacgcaggagttgcgtccgtctcggggagtatcttctctaggctggtgatgggagcagtgtgtgatcttctcggtccacgttacggctgtgccttccttgttatgctttccgcaccaacggtgttctcaatgagcttcgtgagtggagccgcaggattcataacggtgaggttcatgattgggttctgtctagcaacgtttgtgtcttgtcaatatggaatgagtactatgttcaatagtcagatcatcggtctggtgaacggtacagccgccgggtggggaaacatgggtggtggcataacgcagttgctcatgccggttgtctatgagatcataaggcgctgtggtgcaacagcgttcacggcctggaggcttgccttcttcgtccctggttggttgcacatcatcatgggagtcttggtgctcaatctaggtcaagatttgccagatggtaaccgaagtgccttggagaaaaagggagaagttgccaaagacaaattcggaaagattatgtggtacgccgtcacaaactacaggacttggatctttgttcttctctatggatactccatgggagttgagctgagcactgacaatgttatcgccgaatacttctttgacaggttccacttgaagcttcacacagctggaatcatagcagcatgtttcggaatggccaacttctttgctcgtccagcaggaggctatgcatctgaccttgcagccaaatacttcgggatgagagggaggttatgggcgttgtggatcattcagacagcaggtggtgtcttctgcgtgtggctcggccgtgccaacaccctcgttactgccgttgtagctatggtcctcttctctttaggagcacaagccgcttgtggagccaccttcgcaatcgttccctttgtttctcggcgagcccttggtatcatctcaggtttaaccggtgctggaggaaactttgggtcagggctcacacagctcatcttcttctcgacctcaaggttcacaaccgaacaagggctaacatggatgggagtgatgatagttgcctgcacgttgcctgtgactttaatccacttccctcagtggggaagcatgttcttgcctccttctaccgatccagtcaaaggtccgaaggagcactattatgcttcagagtggaatgagcaggagaaggagaagaacatgcatcagggaagcctcaggtttgctaagaacgccaagtctgagggcggccgccgtgtccgttctgctgctaccccgcctgagaacacaccaaacaatgtttgatcataccagccacaaggaaagtgtgaaggatggtcgcagataagaatttatatgtcccacagtgaaaacaaatgcgtatgttatcaatgcttgctggacgttatttgttgtgtatctttctttttttcactgaagaaacatttgttttgtttacggcttcaagaaatatttttctaatcaaaatgtctacctcttgcgacatt

SEQ ID NO: 1515 - protein, 530 aa, Brassica napus
MGDSTGEPGSSMHGVTGREQTFAFSVASPIVPTDKTAKFDLPVDSEHKATVFKLFSFAKPHMRTFHLSWISFSTCFVSTFAAAPLVPIIRENLNLTKQDIGNAGVASVSGSIFSRLVMGAVCDLLGPRYGCAFLVMLSAPTVFSMSFVSGAAGFITVRFMIGFCLATFVSCQYGMSTMFNSQIIGLVNGTAAGWGNMGGGITQLLMPVVYEIIRRCGATAFTAWRLAFFVPGWLHIIMGVLVLNLGQDLPDGNRSALEKKGEVAKDKFGKIMWYAVTNYRTWIFVLLYGYSMGVELSTDNVIAEYFFDRFHLKLHTAGIIAACFGMANFFARPAGGYASDLAAKYFGMRGRLWALWIIQTAGGVFCVWLGRANTLVTAVVAMVLFSLGAQAACGATFAIVPFVSRRALGIISGLTGAGGNFGSGLTQLIFFSTSRFTTEQGLTWMGVMIVACTLPVTLIHFPQWGSMFLPPSTDPVKGPKEHYYASEWNEQEKEKNMHQGSLRFAKNAKSEGGRRVRSAATPPENTPNNV

SEQ ID NO: 1516 - DNA, 1796 bp, Triticum aestivum
  CDS (66)..(1589)
aagctagcaccaagcctccaaggagcaagaagagaagaagccttgctcgatcaagcaaggtcgaaatggaggtggaggccagcgcccatggcgacacggcggcgagcaagttcacgctgcccgtggactccgagcacaaggccaagtccttcagactcttctccttcgccaacccccacatgcgtaccttccacctctcctggatatccttcttcacctgcttcgtctccaccttcgcggcggcaccgttggtgcccatcatccgtgacaacctcaacctcgctaaggccgacatagggaatgccggtgtggcatctgtgtctgggtccatcttctccaggcttgccatgggtgccatctgcgaccttttagggccgcggtatggctgcgccttcctcgtcatgctctcagcacccactgtgttttgcatggctgctatcgacgatgcgtcaggctacatcgccgtacgcttcctcattggcttctccctcgccaccttcgtgtcatgccaatattggatgagcaccatgttcaacagtaagatcattggcacggtgaatggcctcgcggccggctggggcaacatgggcggtggtgccacacaactcatcatgccgcttgttttccatgccatccaaaagtgtggtgccacacccttcgtggcatggcgtattgcctatttcgtgccgggaatgatgcacatcgtcatggggttgcttgtgctcactatgggccaagatctccccgacggcaaccttgcgagtctccagaagaagggggacatggccaaggacaaattctcgaaggtcctttggggtgcggtcaccaactaccggacatggatattcgtcctcctctacggctactgcatgggtgtcgagctcaccaccgacaacgtcatcgccgagtactactacgaccacttccaccttgaccttcgcgccgctggcaccattgccgcttgcttcggcatggccaacatcgtcgcgcgtcctatgggtggctatctctctgaccttggtgcccgctacttcggcatgcgtgctcggctctggaacatctggatcctccagaccgctggtggcgctttctgcatctggctcggtcgtgcatcggcccttcctgcctcagtcacggccatggtcctcttttccatttgtgcacaagctgcttgtggtgctgtatttggcgtcgcacccttcgtttccaggcgttcccttggcatcatctccgggctgaccggcgctggtggcaatgttggcgcagggctaacgcaacttcttttcttcacatcgtcgcaatactccaccgggaggggtctcgagtacatgggcatcatgatcatggcatgcacattacccgtcgctctggtgcacttcccccaatggggctccatgttcttcccggctagcgctgatgccacggaagaggaatactatgcttctgagtggtcggaggaggagaagggcaagggtctccatattacaggccaaaagttcgcagagaactcccgctcagagcgcggcaggcgcaacgtcatccttgccacatccgccacgccacccaacaacacaccccagcacgtataaggcccttatttttatgtcacctaagaattttactgttcatcacgtatatatacaaaccgtatatctacgtctgcagccccagcgtaataagttgtatggggatttatgtttctactagtaaacttaaggaaacgctgcttttgcgttcctgctctgtacgcatgaaatgtaatatcaatttgagtccgaaattactacaaaaaaaaa

SEQ ID NO: 1517 - protein, 507 aa, Triticum aestivum
MEVEASAHGDTAASKFTLPVDSEHKAKSFRLFSFANPHMRTFHLSWISFFTCFVSTFAAAPLVPIIRDNLNLAKADIGNAGVASVSGSIFSRLAMGAICDLLGPRYGCAFLVMLSAPTVFCMAAIDDASGYIAVRFLIGFSLATFVSCQYWMSTMFNSKIIGTVNGLAAGWGNMGGGATQLIMPLVFHAIQKCGATPFVAWRIAYFVPGMMHIVMGLLVLTMGQDLPDGNLASLQKKGDMAKDKFSKVLWGAVTNYRTWIFVLLYGYCMGVELTTDNVIAEYYYDHFHLDLRAAGTIAACFGMANIVARPMGGYLSDLGARYFGMRARLWNIWILQTAGGAFCIWLGRASALPASVTAMVLFSICAQAACGAVFGVAPFVSRRSLGIISGLTGAGGNVGAGLTQLLFFTSSQYSTGRGLEYMGIMIMACTLPVALVHFPQWGSMFFPASADATEEEYYASEWSEEEKGKGLHITGQKFAENSRSERGRRNVILATSATPPNNTPQHV

SEQ ID NO: 1518 - DNA, 2060 bp, Lycopersicon esculentum
  CDS (65)..(1657)
tattctcaatacatttcaaatcaatcatttataaaattaaccagttatttcctcaattgaagaaatggctgatgtagaaggatcaccggggagttctatgcatggagtcaccggaagagaacctgttctcgctttctccgtggcttctccaatggtgcctacggatacctccgccaaattttcagtaccggtggacactgaacacaaggctaaacaatttaagttttattcgttttcgaagcctcatggacttacgttccagctctcctggatctcctttttcacttgtttcgtttcgacttttgctgctgcacctttagttcctattattagggacaatcttaatttgacaaaaatggatgttggtaacgctggggttgcttccgtatccggaagtattttatctaggcttacgatgggtgcggtttgtgatttgttgggtccaaggtatgggtgcgcttttcttatcatgttgtcagcgccaactgttttttgtatgtcttttgtttcatccgctggtggctacgtagctgtccggttcatgattgggttttcgctcgcaacgtttgtgtcttgtcaatattggatgagtactatgtttaatagtaagatcatagggctagtgaacggaacggctgctggatggggtaatatgggtggaggtgcaactcaactcattatgccacttttgtatgatataattcgaagggcgggtgcaactccgttcactgcttggagaattgcattttttattcctggatggcttcatgtggtgatgggtattttagtgttgactcttggccaagatttacccgacggaaatcgtggcactttacagaagacgggtactgttgctaaagataaattcggtaacatattgtggtatgctgcaacaaactacaggacatggatctttgttcttctctatggatactctatgggagttgaactgtcaacagacaacgtcattgctgagtacttcttcgacagatttgatctaaagcttagcacagcggggatcattgctgccacatttggtatggctaaccttttggctcgaccatttggaggattttcttctgattacgcagcaaagaaattcggtatgagagggagactttgggttttgtggattttacaaacacttggaggagtattttgtgttcttttgggtcgttcgaattctctaccacttgcggtaacctttatgatccttttctcaatcggagctcaagctgcttgtggtgcaacttttggtattattccattcatttctcgacgatcgttaggaattataagcggaatgacaggggcaggtggaaattttggttctggattgactcaattgttgtttttcacgagctcaaagtactcgacagcgacagggttaacttacatgggattcatgatcataggatgcactcttcctgttacattttgtcatttcccacaatggggaagcatgtttttgccaccaacaaaagatccagtcaagggaacggaagaacattattatacttcagagtacacagaggccgagaggcaaaaagggatgcaccaaaacagcttgaaattcgctgaaaattgccgatcagagcgtggtaagcgtgttggttccgcaccaaccccaccaaatttgacaccaaatcgtgtttgatgatctttatgaggaatggatagtcttgaatctgtgatttaaatttaaggttcaatgtgctgagtcgtctcaataagcaaaatctatcttgatttttcttctttgttttttttttataatgatattgcttgttgatctttccagacaaataccttgaatccacgaaggtgtatgctttttttttaatgaagtatatataatatattactcattgtgtatgttttctattgcttttttcaaaagaatattctatggccaatggtggttgtgttttactctgtagattcaaaagtgtattataataaaactcttgacttgtaagaaggggactgatcatttattccagttgatttatagaaagttcgtgaaaaaaaaaaaaaaaaaaaaaaaaaaaaaaaaaaaa

SEQ ID NO: 1519 - protein, 530 aa, Lycopersicon esculentum
MADVEGSPGSSMHGVTGREPVLAFSVASPMVPTDTSAKFSVPVDTEHKAKQFKFYSFSKPHGLTFQLSWISFFTCFVSTFAAAPLVPIIRDNLNLTKMDVGNAGVASVSGSILSRLTMGAVCDLLGPRYGCAFLIMLSAPTVFCMSFVSSAGGYVAVRFMIGFSLATFVSCQYWMSTMFNSKIIGLVNGTAAGWGNMGGGATQLIMPLLYDIIRRAGATPFTAWRIAFFIPGWLHVVMGILVLTLGQDLPDGNRGTLQKTGTVAKDKFGNILWYAATNYRTWIFVLLYGYSMGVELSTDNVIAEYFFDRFDLKLSTAGIIAATFGMANLLARPFGGFSSDYAAKKFGMRGRLWVLWILQTLGGVFCVLLGRSNSLPLAVTFMILFSIGAQAACGATFGIIPFISRRSLGIISGMTGAGGNFGSGLTQLLFFTSSKYSTATGLTYMGFMIIGCTLPVTFCHFPQWGSMFLPPTKDPVKGTEEHYYTSEYTEAERQKGMHQNSLKFAENCRSERGKRVGSAPTPPNLTPNRV

SEQ ID NO: 1520 - DNA, 1870 bp, Lycopersicon esculentum
  CDS (52)..(1644)
tttcaaatcaatcatttataaaattaaccagttatttcctcaattgaagaaatgactgatgtagaaggatcaccggggagttctatgcatggagtcaccggaagagaacctgttctcgctttctccgtggcttctccaatggtgcctacggatacctccgccaagttttcagtaccggtggatactgaacacaaggctaaacaatttaagttttattcgttttcgaagcctcatggacttacgttccagctctcctggatctcctttttcacttgtttcgtttcgacttttgctgctgcacctttagttcctattattagggacaatcttaatttgacaaaaatggatgtcggtaacgctggggttgcttccgtatccggaagtattttatctaggcttacgatgggtgcggtttgtgatttgttgggtccaaggtatgggtgcgcttttcttatcatgttgtcggccccaactgttttttgtatgtcctttgtttcatccgctggtggctacgtagccgtccggttcatgattgggttttccctcgcaacgtttgtgtcgtgtcaatattggatgagtactatgtttaatagtaagatcatagggctagtgaacggaacggctgctggatggggtaatatgggtggaggtgcaactcaactcattatgccacttttgtatgatataattcggagggcgggtgcaattccgttcactgcttggagaattgcattttttattcctggatggcttcatgtggtgatgggtattttagtgttgactcttggccaagatttacccgacggaaatcgtggcactttacagaagacgggtactgttgctaaagataaattcggtaacatattgtggtatgctgcaacaaactacaggacatggatctttgttcttctctatggatactctatgggagttgaactgtcaacagacaacgtcattgctgagtacttcttcgacagatttgatctaaagcttagcacagcggggatcattgctgccacatttggtatggctaaccttttggctcgaccatttggaggattttcttctgattacgcagcaaagaaattcggtatgagagggagactttgggttttgtggattttacaaacacttggaggagtattttgtgttcttttgggtcgttcgaattctctaccacttgctgtaacctttatgatccttttctcaatcggagctcaagctgcttgtggtgcaacttttggtattattccattcatttctcgacgatcgttaggaattataagcggaatgacaggggcaggtggaaattttggttctggattgactcaattgttgtttttcacgagctcaaagtactcgacagcgacagggttaacttacatgggattcatgatcataggatgcactcttcctgttacattttgtcatttcccacaatggggaagcatgtttctcccaccaacaaaagatccagtcaagggaacggaagaacattattatacttcagagtacacagaggcagagaggcaaaaagggatgcaccaaaacagcttgaaattcgctgaaaattgccgatcggagcgtggtaagcgcgttggttccgcacccactccaccaaatttgacaccaaaccgtgtctgatcggattgatgatcgtcaatctttagttcaatgagctgagttgtttcaataagcaaaataagtcctgatttttttttcttctttcttttttgtttttttcttaaatgatgttgcttgtcaatacgctggaatctactaaggtgtatgtggttttaaatttacgtatatataatatatatatatatatatattacacattttaatgttaaaaaaaaaaaaaaaaaaa

SEQ ID NO: 1521 - protein, 530 aa, Lycopersicon esculentum
MTDVEGSPGSSMHGVTGREPVLAFSVASPMVPTDTSAKFSVPVDTEHKAKQFKFYSFSKPHGLTFQLSWISFFTCFVSTFAAAPLVPIIRDNLNLTKMDVGNAGVASVSGSILSRLTMGAVCDLLGPRYGCAFLIMLSAPTVFCMSFVSSAGGYVAVRFMIGFSLATFVSCQYWMSTMFNSKIIGLVNGTAAGWGNMGGGATQLIMPLLYDIIRRAGAIPFTAWRIAFFIPGWLHVVMGILVLTLGQDLPDGNRGTLQKTGTVAKDKFGNILWYAATNYRTWIFVLLYGYSMGVELSTDNVIAEYFFDRFDLKLSTAGIIAATFGMANLLARPFGGFSSDYAAKKFGMRGRLWVLWILQTLGGVFCVLLGRSNSLPLAVTFMILFSIGAQAACGATFGIIPFISRRSLGIISGMTGAGGNFGSGLTQLLFFTSSKYSTATGLTYMGFMIIGCTLPVTFCHFPQWGSMFLPPTKDPVKGTEEHYYTSEYTEAERQKGMHQNSLKFAENCRSERGKRVGSAPTPPNLTPNRV

SEQ ID NO: 1522 - DNA, 1825 bp, Hordeum vulgare
  CDS (94)..(1614)
tctcagttgccactgcagctgatcaagcaagctagctccaaacctccaaggaggaagcagagaaggagactagctcgatcaagcaaggtccaaatggaggtggaggctggtgcccatggcgacacggcggcgagcaagttcacgttgcccgtggactccgagcacaaggccaagtccttcaggctcttctccttcgccaacccacacatgcgcacctttcacctatcgtggatatccttcttcacatgcttcgtctccacctttgccgcggcgcccctggtgcccatcatccgcgacaacctgaacctcgccaaggccgacatagggaatgccggtgtggcatctgtgtctgggtctatcttctcgaggcttgccatgggcgccatctgcgaccttttggggccgcggtatgggtgtgccttcctcgtcatgctctcagcgccaaccgtcttctgcatggccgtcatcgatgacgcctcagggtacatcgccgtacgcttcctcatcggcttctcccttgccacctttgtgtcgtgccaatactggatgagcaccatgttcaacagtaaaatcatcggcacggtcaatggcctcgcggccggctggggcaacatgggcggtggtgccacacaactcatcatgccgcttgttttccacgccatccaaaaatgtggtgccacaccatttgtggcatggcgtattgcctacttcgtgcccggaatgatgcacatcgtgatgggcttgctggtactcaccatggggcaagatctccctgatgggaacctcgcgagcctccagaagagaggagacatggccaaggacaagttctccaaggtcctttggggcgccgtcaccaactaccggacatggatctttgtcctcctatatggctactgcatgggtgtcgaactcaccactgacaatgtcattgccgagtactacttcgaccacttccacctagaccttcgcgccgctggtaccatcgccgcctgcttcggtatggccaacatagtcgcacgtcctatgggcggctacctctctgaccttggcgcccgctatttcggcatgcgtgccctttggaacatctggatcctccaaaccgctggtggcgctttctgcatctggctcggtcgtgcatcggccctccctgcctcggtgaccgccatggtcctcttctccatctgtgcccaggctgcctgtggtgctatctttggtgtcgcacccttcgtctccaggcgttcccttggcatcatttccgggttgaccggtgccggtggaaacgtgggcgcaggactcacacaacttctattcttcacctcatcgcaatactccactggtaggggtctcgagtacatgggcatcatgatcatggcatgcacgctgcccgtcgctcttgtgcactttccgcaatggggatccatgttcttcccggccagcgctgatgccactgaggaggagtactatgcttccgagtggtcggaggaggagaagggcaagggtctccatatcgcaggccaaaagttcgccgagaactcccgctcggagcgcggcaggcgcaacgtcatctttgccacatccgccacgccgcccaacaacacaccccagcaggtataaggcatttttttttgttacctatgaattttacagctcatggcgtatatatacaaacagtatatttacgtttgcagccccagcgtaataagttgtatgggggtttatctttttactatggtaaacctaaggacatgtattgtcaaattgagtccgaaattaatacatgaacagtgttgatgtttgtgtatgcttgaaaaaaaaaaaaaaaaaa

SEQ ID NO: 1523 - protein, 506 aa, Hordeum vulgare
MEVEAGAHGDTAASKFTLPVDSEHKAKSFRLFSFANPHMRTFHLSWISFFTCFVSTFAAAPLVPIIRDNLNLAKADIGNAGVASVSGSIFSRLAMGAICDLLGPRYGCAFLVMLSAPTVFCMAVIDDASGYIAVRFLIGFSLATFVSCQYWMSTMFNSKIIGTVNGLAAGWGNMGGGATQLIMPLVFHAIQKCGATPFVAWRIAYFVPGMMHIVMGLLVLTMGQDLPDGNLASLQKRGDMAKDKFSKVLWGAVTNYRTWIFVLLYGYCMGVELTTDNVIAEYYFDHFHLDLRAAGTIAACFGMANIVARPMGGYLSDLGARYFGMRALWNIWILQTAGGAFCIWLGRASALPASVTAMVLFSICAQAACGAIFGVAPFVSRRSLGIISGLTGAGGNVGAGLTQLLFFTSSQYSTGRGLEYMGIMIMACTLPVALVHFPQWGSMFFPASADATEEEYYASEWSEEEKGKGLHIAGQKFAENSRSERGRRNVIFATSATPPNNTPQQV

SEQ ID NO: 1524 - DNA, 1704 bp, Hordeum vulgare
  CDS (95)..(1618)
caccactgcaagcatatttaggcttagttagctccaaggagcaaagctaaaaagaacctagctaggctagctcgatccagctagctcagtagatatggaggtggaggccggagctcatggcgatgcggcggcgagcaagttcacgctgcccgtggactccgagcacaaggccaagtccttcaggctcttctccttcgccaacccgcacatgcgcaccttccacctctcgtggatctccttcttcacctgcttcgtctccacctttgccgctgctccgttggtgcccatcatccgcgacaacctcaacctcgccaaggccgacatcggcaatgccggtgtggcgtccgtgtccggctccatcttctcgaggctcgccatgggcgccatttgtgacctgcttggcccgcggtacggttgtgcctttctcgtcatgctatcggcgccaaccgtcttctgcatggccgtcatcgacgacgcgtcgggatacatcgcagtccgcttcctcatcggcttctccctcgcaaccttcgtgtcatgccagtactggatgagcacaatgttcaacagtaaaatcatcggcacggttaatggcctcgcagccgggtggggcaacatgggtggcggggccacacagctcatcatgcccctcgtcttccatgccatccaaaagtgtggtgccacaccctttgtggcatggcgtatcgcctacttcgtgccggggatgatgcacatcgtgatgggcctactcgtgctcaccatgggacaagacctccctgatgggaacctcgcaagcctgcagaagaagggagacatggccaaggacaagttctccaaggtcctttggggcgccgttaccaactaccggacatggatctttgtcctcctctatggctactgcatgggtgtcgagctcaccactggcaatgtcattgccgagtactacttcgatcacttccacctaaacctccgtgccgccggtaccatcgccgcttgcttcggcatggccaacatcgtcgcacgtcctatgggcggctacctctccgaccttggtgctcgctacttcggtatgcgtgctcgcctttggaacatctggatccttcagacagctggcggcgccttttgcatctggcttgggcgcgcctcggccctccccgcctcagtgactgccatggtcctcttctccatctgcgcccaggctgcgtgtggtgctatctttggtgtcgaacccttcgtctccaggcgttcccttggcatcatttccgggttgaccggtgctggtggaaacgtgggcgcagggctcacacagcttctcttcttcacttcgtcgcaatactccactggcaggggtcttgagtacatgggcatcatgatcatggcatgcaccttacccgtcgctctcgttcacttccctcagtggggctctatgttcttggctgccagtgccgacgccacggaggaggagtactacgcctcagagtggtcagaggaggagaagagcaagggtctccatatcgcaggacaaaagtttgctgagaactcccgctcggaacgcggcaggcgcaacgtcatccttgccacatccgccacaccacccaacaacacgcccctacacgtataagtttcaaattttgtgttacacaagaaatgtacatcttgctgagtatatatacacatcgtatattttagtaaaaaaaaaaaaaaaaa

SEQ ID NO: 1525 - protein, 507 aa, Hordeum vulgare
MEVEAGAHGDAAASKFTLPVDSEHKAKSFRLFSFANPHMRTFHLSWISFFTCFVSTFAAAPLVPIIRDNLNLAKADIGNAGVASVSGSIFSRLAMGAICDLLGPRYGCAFLVMLSAPTVFCMAVIDDASGYIAVRFLIGFSLATFVSCQYWMSTMFNSKIIGTVNGLAAGWGNMGGGATQLIMPLVFHAIQKCGATPFVAWRIAYFVPGMMHIVMGLLVLTMGQDLPDGNLASLQKKGDMAKDKFSKVLWGAVTNYRTWIFVLLYGYCMGVELTTGNVIAEYYFDHFHLNLRAAGTIAACFGMANIVARPMGGYLSDLGARYFGMRARLWNIWILQTAGGAFCIWLGRASALPASVTAMVLFSICAQAACGAIFGVEPFVSRRSLGIISGLTGAGGNVGAGLTQLLFFTSSQYSTGRGLEYMGIMIMACTLPVALVHFPQWGSMFLAASADATEEEYYASEWSEEEKSKGLHIAGQKFAENSRSERGRRNVILATSATPPNNTPLHV

SEQ ID NO: 1526 - DNA, 1593 bp, Glycine max
  CDS (1)..(1593)
atggctgatattgagggttctccaggaagctccatgcatggagtaactggaagggaacaaaccttcatagcctcagtggcttcccctatggtccctacagacaccacagcaaatttcgctttgccagtagattctgagcacaaggcaaaaattttcaagcttttttccttagccaaccctcacatgagaaccttccacttgtcttggatatccttcttcacttgctttgtctcgaccttcgcggcggcgccacttgtccccatcattcgcgacaaccttaacctcaccaaaggcgacatcgggaacgccggcgttgcctctgtctccggcagcatcttctccaggctcacaatgggcgcggtttgtgacctacttggaccgcgttacggctgtgccttcctcatcatgctctctgcaccaaccgtgttctgcatgtcttttgtgaatgatgctgctggttacatagcagtgaggttcatgatagggttttcgttggccacttttgtttcatgccagtattggatgagtactatgtttaatagtaagattatagggcttgtgaatgggactgctgcagggtgggggaacatgggtggtggggccactcagctcataatgcctatggtttatgagttgattagaagagctggggctactccctttacggcttggaggattgctttcttcgtccctggttggatgcatgtggtcatggggatcttggtcctaaccctaggccaagatttacctgatggaaaccttggtgccttgcagaagaagggtaatgttgccaaagacaaattctccaaggtgctatggtatgccataacaaattacaggacatgggtttttgccctcctatatgggtactcgatgggagttgaattaaccactgacaatgtcattgctgagtatttctatgacaggtttaatctcaagctacacactgctggaatcattgctgcttcatttggaatggcaaatctcctagctcgtccctttggtggatacacttctgatgttgcagccaggttgtttggcatgaggggcaggctttggaacctgtggatcctccaaaccctaggaggcgttttctgcatatggcttgggcgtgccaattcccttcccattgcagtcttggccatgatcctcttctccattggtgctcaagctgcatgcggtgcaacttttggcatcattcccttcatctcaaggcgttctcttgggatcatatcaggcctaactggtgcaggtggaaactttggttctggtttgacccaattgatcttcttttcaacctcaaggttttctacttccactggtctctcccttatgggtgtcatgattgtgtgttgcactcttcctgtgactcttgttcacttccctcagtggggtagcatgttcctccctccttcaaaggatgtcaacaagtccactgaggaatactattacaccgctgagtggaacgaggaagagaagcaaaaagggttgcaccagaatagtctcaagtttgctgagaatagccgttcagagagaggtaagcgtgtggcctcagcaccaacaccaccaaacacaactccaactcatgcctag

SEQ ID NO: 1527 - protein, 530 aa, Glycine max
MADIEGSPGSSMHGVTGREQTFIASVASPMVPTDTTANFALPVDSEHKAKIFKLFSLANPHMRTFHLSWISFFTCFVSTFAAAPLVPIIRDNLNLTKGDIGNAGVASVSGSIFSRLTMGAVCDLLGPRYGCAFLIMLSAPTVFCMSFVNDAAGYIAVRFMIGFSLATFVSCQYWMSTMFNSKIIGLVNGTAAGWGNMGGGATQLIMPMVYELIRRAGATPFTAWRIAFFVPGWMHVVMGILVLTLGQDLPDGNLGALQKKGNVAKDKFSKVLWYAITNYRTWVFALLYGYSMGVELTTDNVIAEYFYDRFNLKLHTAGIIAASFGMANLLARPFGGYTSDVAARLFGMRGRLWNLWILQTLGGVFCIWLGRANSLPIAVLAMILFSIGAQAACGATFGIIPFISRRSLGIISGLTGAGGNFGSGLTQLIFFSTSRFSTSTGLSLMGVMIVCCTLPVTLVHFPQWGSMFLPPSKDVNKSTEEYYYTAEWNEEEKQKGLHQNSLKFAENSRSERGKRVASAPTPPNTTPTHA

SEQ ID NO: 1528 - DNA, 1593 bp, Glycine max
  CDS (1)..(1593)
atggctgagattgagggttctcccggaagctccatgcatggagtaacaggaagagaacaaacatttgtagcctcagttgcttctccaattgtccctacagacaccacagccaaatttgctctcccagtggattcagaacacaaggccaaggttttcaaactcttctccctggccaatccccacatgagaaccttccacctttcttggatctccttcttcacctgcttcgtctcgacattcgcagcagcacctcttgtgcccatcatccgcgacaaccttaacctcaccaaaagcgacattggaaacgccggggttgcttctgtctccggaagcatcttctcaaggctcgcaatgggtgcagtctgtgacatgttgggtccacgctatggctgcgccttcctcatcatgctttcggcccctacggtgttctgcatgtcctttgtgaaagatgctgcggggtacatagcggttcggttcttgattgggttctcgttggcgacgtttgtgtcgtgccagtactggatgagcacgatgttcaacagtaagattatagggcttgcgaatgggactgctgcggggtgggggaacatgggtggtggagccactcagctcataatgcctttggtgtatgagcttatcagaagagctggggctactcccttcactgcttggaggattgccttctttgttccgggtttcatgcatgtcatcatggggattcttgtcctcactctaggccaggacttgcctgatggaaacctcggggccttgcggaagaagggtgatgtagctaaagacaagttttccaaggtgctatggtatgccataacaaattacaggacatggatttttgctctcctctatgggtactccatgggagttgaattaacaactgacaatgtcattgctgagtatttctatgacagatttaatctcaagctacacactgctggaatcattgctgcttcatttggaatggcaaacttagttgctcgaccttttggtggatatgcttcagatgttgcagccaggctgtttggcatgaggggaagactctggaccctttggatcctccaaaccttaggaggggttttctgtatttggcttggccgtgccaattctcttcctattgctgtattggccatgatcctgttctctataggagctcaagctgcatgtggtgcaacttttggcatcattcctttcatctcaagaaggtctttggggatcatatcaggtctaactggtgcaggtggaaactttgggtctggcctcacccaattggtcttcttttcaacctccaaattctctactgccacaggtctctccttgatgggtgtaatgatagtggcttgcactctaccagtgagtgttgttcacttcccacagtggggtagcatgtttctaccaccctcaaaagatgtcagcaaatccactgaagaattctattacacctctgaatggaatgaggaagagaagcagaagggtttgcaccagcaaagtctcaaatttgctgagaatagccgatctgagagaggaaagcgagtggcttcagcaccaacacctccaaatgcaactcccactcatgtctag

SEQ ID NO: 1529 - protein, 530 aa, Glycine max; identical to SEQ ID NO: 1487

SEQ ID NO: 1530 - DNA, 1575 bp, Zea mays
  CDS (1)..(1575)
atggcggccgtcggcgccccgggcagctctctgcacggagtcacggggcgcgagccggcgttcgccttctccacggagcacgaggaggcggcgagcaatggcggcaagttcgacctgccggtggactcggagcacaaggcgaagagcgtccggctcttctccgtggcgaacccacacatgcgcaccttccacctctcctggatctccttcttcacctgcttcgtgtccaccttcgccgccgcgccgctggtccccatcatccgcgacaacctcaacctcaccaaggccgacatcggcaacgcgggcgtggcctccgtgtcgggctccatcttctcccgcctcaccatgggcgccgtctgcgacctgctgggcccgcgctacggctgcgccttcctcatcatgctgtccgcgcccaccgtgttctgcatgtcgctcatcgacgacgccgcgggctacatcaccgtcaggttcctcatcggcttctccctcgccaccttcgtctcctgccagtactggatgagcaccatgttcagcagcaagatcatcggcaccgtcaacgggctcgccgccggatggggcaacatgggaggcggcgccacgcagctcatcatgccgctcgtctacgacgtcatccgcaagtgcggcgccacgccattcacggcctggcgcctcgcctacttcgtgccgggcctcatgcacgtcgtcatgggcgtcctggtgctcacgctggggcaggacctccccgacggcaacctcaggtcgctgcagaagaagggcaacgtcaacaaggacagcttctccaaggtcatgtggtacgccgtcatcaactaccgtacctggatcttcgtcctcctctacggctactgcatgggcgtcgagctcaccaccgacaacgtcatcgccgagtacatgtacgaccgcttcgacctcgacctccgcgtcgccgggaccatcgccgcctgcttcggcatggccaacatcgtcgcacgccccatgggcggcatcatgtccgacatgggcgcgcgctactggggcatgcgcgctcgcctctggaacatctggatcctccagaccgccggcggcgccttctgcctctggctgggacgcgccagcaccctccccgtctccgtcgtcgccatggtgctcttctccttctgcgcgcaggcggcctgcggcgccatcttcggggtcatccccttcgtctcccgccgctccctcggcatcatctccggcatgacgggcgccggcggcaacttcggcgccgggctcacgcagctgctcttctttacctcctcgacctactccacgggcagggggctggagtacatgggcatcatgatcatggcgtgcacgctgccggtggtgttcgtgcacttcccgcagtgggggtccatgttcttcccgcccagcgccaccgccgacgaggagggctactacgcctccgagtggaacgacgacgagaagagcaagggactccatagcgccagcctcaagttcgccgagaacagccgctcagagcgcggcaagcgaaacgtcatccaggccgacgccgccgccacgccggagcatgtctaa

SEQ ID NO: 1531 - protein, 524 aa, Zea mays; identical to SEQ ID NO: 1495

SEQ ID NO: 1532 - DNA, 1575 bp, Zea mays
  CDS (1)..(1575)
atggcggccgtcggcgctccggggagctctctgcacggagtcacagggcgcgagccggcgttcgccttctccacggagcacgaggaggcggcgagcaatggcggcaagttcgacctgccggtggactcggagcacaaggcgaagagcgtccggctcttctccgtggcgaacccacacatgcgcaccttccacctctcctggatctccttcttcacctgcttcgtgtccaccttcgccgccgcgccgctggtccccatcatccgcgacaacctcaacctcaccaaggccgacatcggcaacgcgggcgtggcctccgtgtcgggctccatcttctcccgcctcaccatgggcgccgtctgcgacctgctgggcccgcgctacggctgcgccttcctcatcatgctgtccgcgcccaccgtgttctgcatgtcgctcatcgacgacgccgcgggctacatcaccgtcaggttcctcatcggcttctccctcgccaccttcgtctcctgccagtactggatgagcaccatgttcagcagcaagatcatcggcaccgtcaacgggctcgccgccggatggggcaacatgggaggcggcgccacgcagctcatcatgccgctcgtctacgacgtcatccgcaagtgcggcgccacgccattcacggcctggcgcctcgcctacttcgtgccgggcctcatgcacgtcgtcatgggcgtcctggtgctcacgctggggcaggacctccccgacggcaacctcaggtcgctgcagaagaagggcaacgtcaacaaggacagcttctccaaggtcatgtggtacgccgtcatcaactaccgtacctggatcttcgtcctcctctacggctactgcatgggcgtcgagctcaccaccgacaacgtcatcgccgagtacatgtacgaccgcttcgacctcgacctccgcgtcgccgggaccatcgccgcctgcttcggcatggccaacatcgtcgcacgccctatgggcggcatcatgtcggacatgggcgcgcgctactggggcatgcgcgctcgcctctggaacatctggatcctccagaccgccggcggcgccttctgcctctggctgggacgcgccagcaccctccccgtctccgtcgtcgccatggtgctcttctccttctgcgcgcaggcggcctgcggcgccatcttcggggtcatccccttcgtctcccgccgctccctcggcatcatctccggcatgacgggcgccggcggcaacttcggcgccgggctcacgcagctgctcttctttacctcctcgacctactccacgggcagggggctggagtacatgggcatcatgatcatggcgtgcacgctgccggtggtgttcgtgcacttcccgcagtgggggtccatgttcttcccgcccagcgccaccgccgacgaggagggctactacgcctccgagtggaacgacgacgagaagagcaagggactccatagcgctagcctcaagttcgccgagaacagccgctcagagcgcggcaagcgcaacgtcatccaggccgacgccgccgccacgccggagcatgtctaa

SEQ ID NO: 1533 - protein, 524 aa, Zea mays; identical to SEQ ID NO: 1495

SEQ ID NO: 1534 - DNA, 29 bp, Artificial sequence
  primer
atagagctctggagttacagcaagagaac

SEQ ID NO: 1535 - DNA, 29 bp, Artificial sequence
  primer
atacccgggccagagacggatgcgactcc

SEQ ID NO: 1536 - DNA, 22 bp, Artificial sequence
  primer
atgactcacaaccattctaatg

SEQ ID NO: 1537 - DNA, 22 bp, Artificial sequence
  primer
tcaaacatgacttggagttccg

SEQ ID NO: 1538 - DNA, 29 bp, Artificial sequence
  primer
ataccatggtggagttacagcaagagaac

SEQ ID NO: 1539 - DNA, 31 bp, Artificial sequence
  primer
atattaattaaccagagacggatgcgactcc

SEQ ID NO: 1540 - DNA, 29 bp, Artificial sequence
  primer
ataggtacctggagttacagcaagagaac

SEQ ID NO: 1541 - DNA, 29 bp, Artificial sequence
  primer
atagtcgacccagagacggatgcgactcc

SEQ ID NO: 1542 - protein, 493 aa, Artificial sequence
  consensus sequence
  Variant (2)..(3): Xaa in position 2 to 3 is any amino acid
  Variant (7)..(7): Xaa in position 7 is any amino acid
  Variant (9)..(9): Xaa in position 9 is any amino acid
  Variant (12)..(17): Xaa in position 12 to 17 is any amino acid
  Variant (19)..(21): Xaa in position 19 to 21 is any amino acid
  Variant (25)..(26): Xaa in position 25 to 26 is any amino acid
  Variant (32)..(32): Xaa in position 32 is any amino acid
  Variant (36)..(36): Xaa in position 36 is any amino acid
  Variant (48)..(48): Xaa in position 48 is any amino acid
  Variant (53)..(53): Xaa in position 53 is any amino acid
  Variant (58)..(58): Xaa in position 58 is any amino acid
  Variant (60)..(60): Xaa in position 60 is any amino acid
  Variant (62)..(62): Xaa in position 62 is any amino acid
  Variant (67)..(67): Xaa in position 67 is any amino acid
  Variant (73)..(73): Xaa in position 73 is any amino acid
  Variant (79)..(79): Xaa in position 79 is any amino acid
  Variant (83)..(83): Xaa in position 83 is any amino acid
  Variant (86)..(87): Xaa in position 86 to 87 is any amino acid
  Variant (93)..(93): Xaa in position 93 is any amino acid
  Variant (97)..(97): Xaa in position 97 is any amino acid
  Variant (100)..(100): Xaa in position 100 is any amino acid
  Variant (103)..(103): Xaa in position 103 is any amino acid
  Variant (105)..(106): Xaa in position 105 to 106 is any amino acid
  Variant (108)..(112): Xaa in position 108 to 112 is any amino acid
  Variant (114)..(114): Xaa in position 114 is any amino acid
  Variant (116)..(118): Xaa in position 116 to 118 is any amino acid
  Variant (122)..(122): Xaa in position 122 is any amino acid
  Variant (126)..(126): Xaa in position 126 is any amino acid
  Variant (139)..(139): Xaa in position 139 is any amino acid
  Variant (142)..(144): Xaa in position 142 to 144 is any amino acid
  Variant (148)..(149): Xaa in position 148 to 149 is any amino acid
  Variant (152)..(152): Xaa in position 152 is any amino acid
  Variant (159)..(159): Xaa in position 159 is any amino acid
  Variant (163)..(163): Xaa in position 163 is any amino acid
  Variant (167)..(167): Xaa in position 167 is any amino acid
  Variant (170)..(170): Xaa in position 170 is any amino acid
  Variant (172)..(174): Xaa in position 172 to 174 is any amino acid
  Variant (176)..(178): Xaa in position 176 to 178 is any amino acid
  Variant (180)..(180): Xaa in position 180 is any amino acid
  Variant (181)..(181): Xaa in position 181 is any or no amino acid
  Variant (183)..(183): Xaa in position 183 is any amino acid
  Variant (185)..(185): Xaa in position 185 is any amino acid
  Variant (189)..(189): Xaa in position 189 is any amino acid
  Variant (191)..(191): Xaa in position 191 is any amino acid
  Variant (193)..(193): Xaa in position 193 is any amino acid
  Variant (196)..(200): Xaa in position 196 to 200 is any amino acid
  Variant (203)..(203): Xaa in position 203 is any amino acid
  Variant (207)..(208): Xaa in position 207 to 208 is any amino acid
  Variant (217)..(219): Xaa in position 217 to 219 is any amino acid
  Variant (221)..(221): Xaa in position 221 is any amino acid
  Variant (223)..(223): Xaa in position 223 is any amino acid
  Variant (224)..(236): Xaa in position 224 to 236 is any or no amino acid
  Variant (238)..(240): Xaa in position 238 to 240 is any amino acid
  Variant (243)..(243): Xaa in position 243 is any amino acid
  Variant (245)..(250): Xaa in position 245 to 250 is any amino acid
  Variant (252)..(253): Xaa in position 252 to 253 is any amino acid
  Variant (260)..(261): Xaa in position 260 to 261 is any amino acid
  Variant (267)..(268): Xaa in position 267 to 268 is any amino acid
  Variant (273)..(274): Xaa in position 273 to 274 is any amino acid
  Variant (282)..(283): Xaa in position 282 to 283 is any amino acid
  Variant (285)..(285): Xaa in position 285 is any amino acid
  Variant (287)..(287): Xaa in position 287 is any amino acid
  Variant (289)..(289): Xaa in position 289 is any amino acid
  Variant (291)..(292): Xaa in position 291 to 292 is any amino acid
  Variant (295)..(295): Xaa in position 295 is any amino acid
  Variant (299)..(299): Xaa in position 299 is any amino acid
  Variant (305)..(306): Xaa in position 305 to 306 is any amino acid
  Variant (310)..(310): Xaa in position 310 is any amino acid
  Variant (313)..(314): Xaa in position 313 to 314 is any amino acid
  Variant (317)..(318): Xaa in position 317 to 318 is any amino acid
  Variant (320)..(321): Xaa in position 320 to 321 is any amino acid
  Variant (326)..(326): Xaa in position 326 is any amino acid
  Variant (330)..(331): Xaa in position 330 to 331 is any amino acid
  Variant (334)..(334): Xaa in position 334 is any amino acid
  Variant (337)..(337): Xaa in position 337 is any amino acid
  Variant (340)..(340): Xaa in position 340 is any amino acid
  Variant (343)..(344): Xaa in position 343 to 344 is any amino acid
  Variant (348)..(350): Xaa in position 348 to 350 is any amino acid
  Variant (351)..(351): Xaa in position 351 is any or no amino acid
  Variant (353)..(358): Xaa in position 353 to 358 is any amino acid
  Variant (360)..(360): Xaa in position 360 is any amino acid
  Variant (364)..(366): Xaa in position 364 to 366 is any amino acid
  Variant (373)..(373): Xaa in position 373 is any amino acid
  Variant (376)..(377): Xaa in position 376 to 377 is any amino acid
  Variant (380)..(380): Xaa in position 380 is any amino acid
  Variant (387)..(387): Xaa in position 387 is any amino acid
  Variant (391)..(391): Xaa in position 391 is any amino acid
  Variant (398)..(398): Xaa in position 398 is any amino acid
  Variant (400)..(401): Xaa in position 400 to 401 is any amino acid
  Variant (406)..(406): Xaa in position 406 is any amino acid
  Variant (409)..(414): Xaa in position 409 to 414 is any amino acid
  Variant (415)..(417): Xaa in position 415 to 417 is any or no amino acid
  Variant (419)..(420): Xaa in position 419 to 420 is any amino acid
  Variant (423)..(424): Xaa in position 423 to 424 is any amino acid
  Variant (427)..(427): Xaa in position 427 is any amino acid
  Variant (430)..(431): Xaa in position 430 to 431 is any amino acid
  Variant (437)..(439): Xaa in position 437 to 439 is any amino acid
  Variant (446)..(446): Xaa in position 446 is any amino acid
  Variant (449)..(455): Xaa in position 449 to 455 is any amino acid
  Variant (456)..(459): Xaa in position 456 to 459 is any or no amino acid
  Variant (462)..(462): Xaa in position 462 is any amino acid
  Variant (465)..(466): Xaa in position 465 to 466 is any amino acid
  Variant (468)..(471): Xaa in position 468 to 471 is any amino acid
  Variant (473)..(474): Xaa in position 473 to 474 is any amino acid
  Variant (477)..(477): Xaa in position 477 is any amino acid
  Variant (479)..(481): Xaa in position 479 to 481 is any amino acid
  Variant (482)..(483): Xaa in position 482 to 483 is any or no amino acid
  Variant (486)..(486): Xaa in position 486 is any amino acid
  Variant (488)..(489): Xaa in position 488 to 489 is any amino acid
  Variant (492)..(492): Xaa in position 492 is any amino acid
FXXPVDXEXKAXXXXXXSXXXPHMXXFHLSWXSFFXCFVSTFAAAPLXPIIRXNLNLXKXDXGNAGXASVSGXIFSRLXMGAXCDXXGPRYGXAFLXMLXAPXVXXMXXXXXAXGXXXVRFXIGFXLATFVSCQYWMSXMFXXXIIGXXNGXAAGWGNXGGGXTQLXMPXVXXXIXXXGXXTXFXAWRXAXFXPGXXXXXMGXLVLXXGQDLPDGNXXXLXKXXXXXXXXXXXXXXGXXXKDXFXXXXXXAXXNYRTWIXXLLYGYXXGVELXXDNVIAEYXXDXFXLXLXXAGXIAAXFGMANXXARPXGGXXSDXXAXXFGMRXRLWXXWIXQTXGGXFCXXLGRXXXXLXXXXXXMXLFSXXXQAACGAXFGXXPFXSRRSLGXISGXTGAGGNXGXXLTQLXFFXXXXXXXXXTXXGLXXMGXMIXXCTLPVXXXHFPQWGXMFXXXXXXXXXXXEEXYYXXEXXXXEXXKGXHXXXXXFAXNXXSEXG

SEQ ID NO: 1543 - protein, 40 aa, Artificial sequence
  protein pattern
  Variant (5)..(5): Xaa in position 5 is Ala, Leu or Val
  Variant (6)..(6): Xaa in position 6 is any amino acid
  Variant (8)..(8): Xaa in position 8 is Ala or Gly
  Variant (9)..(9): Xaa in position 9 is Ile or Val
  Variant (10)..(10): Xaa in position 10 is any amino acid
  Variant (13)..(13): Xaa in position 13 is Ile or Val
  Variant (20)..(20): Xaa in position 20 is Ile, Leu or Val
  Variant (21)..(21): Xaa in position 21 is Ile or Val
  Variant (24)..(24): Xaa in position 24 is Leu or Met
  Variant (25)..(25): Xaa in position 25 is Ser or Thr
  Variant (27)..(27): Xaa in position 27 is Ala or Gly
  Variant (31)..(31): Xaa in position 31 is Phe or Val
  Variant (33)..(33): Xaa in position 33 is Ala or Ser
  Variant (34)..(34): Xaa in position 34 is Gly or Val
  Variant (35)..(35): Xaa in position 35 is Leu or Val
  Variant (38)..(38): Xaa in position 38 is any amino acid
  Variant (39)..(39): Xaa in position 39 is Ile, Leu or Val
AACGXXFXXXPFXSRRSLGXXSGXXGXGGNXGXXXTQXXF

SEQ ID NO: 1544 - protein, 37 aa, Artificial sequence
  protein pattern
  Variant (4)..(4): Xaa in position 4 is Phe, Ile, Leu or Met
  Variant (6)..(6): Xaa in position 6 is Phe or Tyr
  Variant (8)..(8): Xaa in position 8 is Ile, Leu or Val
  Variant (11)..(11): Xaa in position 11 is any amino acid
  Variant (12)..(12): Xaa in position 12 is Leu or Met
  Variant (13)..(14): Xaa in position 13 to 14 is any amino acid
  Variant (15)..(15): Xaa in position 15 is Ile or Val
  Variant (18)..(18): Xaa in position 18 is Ile, Leu or Val
  Variant (22)..(22): Xaa in position 22 is any amino acid
  Variant (23)..(23): Xaa in position 23 is Leu or Met
  Variant (29)..(29): Xaa in position 29 is Asp or Gly
  Variant (32)..(33): Xaa in position 32 to 33 is any amino acid
  Variant (34)..(34): Xaa in position 34 is Ala, Asp, Gln, Ser or Thr
  Variant (35)..(35): Xaa in position 35 is Leu or Met
  Variant (36)..(36): Xaa in position 36 is Glu, Gln or Arg
AWRXAXFXPGXXXXXMGXLVLXXGQDLPXGNXXXXXK

SEQ ID NO: 1545 - protein, 18 aa, Artificial sequence
  protein pattern
  Variant (5)..(5): Xaa in position 5 is Ile or Val
  Variant (11)..(11): Xaa in position 11 is Ala or Ser
  Variant (12)..(12): Xaa in position 12 is Ile or Val
  Variant (13)..(13): Xaa in position 13 is Phe or Leu
  Variant (14)..(14): Xaa in position 14 is Ala or Ser
  Variant (17)..(17): Xaa in position 17 is Ala, Thr or Val
GNAGXASVSGXXXXRLXM

SEQ ID NO: 1546 - protein, 15 aa, Artificial sequence
  protein pattern
  Variant (2)..(2): Xaa in position 2 is Ser or Thr
  Variant (6)..(6): Xaa in position 6 is any amino acid
  Variant (7)..(7): Xaa in position 7 is Phe, Leu or Val
  Variant (8)..(9): Xaa in position 8 to 9 is any amino acid
  Variant (15)..(15): Xaa in position 15 is Gly or Ser
CXLPVXXXXFPQWGX

SEQ ID NO: 1547 - protein, 20 aa, Artificial sequence
  protein pattern
  Variant (2)..(3): Xaa in position 2 to 3 is any or no amino acid
  Variant (6)..(7): Xaa in position 6 to 7 is any amino acid
  Variant (8)..(8): Xaa in position 8 is any or no amino acid
  Variant (10)..(10): Xaa in position 10 is Trp or Tyr
  Variant (11)..(11): Xaa in position 11 is Asp, Asn, Ser or Thr
  Variant (12)..(12): Xaa in position 12 is any amino acid
  Variant (13)..(13): Xaa in position 13 is Ala, Asp, Glu, Asn, Gln or Thr
  Variant (15)..(17): Xaa in position 15 to 17 is any amino acid
  Variant (18)..(18): Xaa in position 18 is Gly or Asn
  Variant (19)..(19): Xaa in position 19 is any amino acid
EXXYYXXXEXXXXEXXXXXH

SEQ ID NO: 1548 - protein, 21 aa, Artificial sequence
  protein pattern
  Variant (2)..(2): Xaa in position 2 is Leu, Met or Val
  Variant (3)..(3): Xaa in position 3 is Leu or Val
  Variant (5)..(5): Xaa in position 5 is Ala or Pro
  Variant (9)..(9): Xaa in position 9 is Cys or Thr
  Variant (12)..(12): Xaa in position 12 is any or no amino acid
  Variant (14)..(14): Xaa in position 14 is any or no amino acid
  Variant (16)..(16): Xaa in position 16 is Ile or Leu
  Variant (17)..(17): Xaa in position 17 is any amino acid
  Variant (18)..(18): Xaa in position 18 is Ala or Ser
  Variant (20)..(20): Xaa in position 20 is Ala or Thr
DXXGXRYGXAFXLXMXXXPXV

SEQ ID NO: 1549 - protein, 12 aa, Artificial sequence
  protein pattern
  Variant (2)..(2): Xaa in position 2 is any amino acid
  Variant (4)..(4): Xaa in position 4 is Ala, Cys or Ser
  Variant (5)..(5): Xaa in position 5 is any amino acid
  Variant (6)..(6): Xaa in position 6 is Arg or Ser
  Variant (8)..(8): Xaa in position 8 is any amino acid
  Variant (10)..(10): Xaa in position 10 is Lys or Arg
  Variant (11)..(11): Xaa in position 11 is any amino acid
  Variant (12)..(12): Xaa in position 12 is Ala, Gly, Asn, Ser or Val
AXNXXXEXGXXX

SEQ ID NO: 1550 - protein, 15 aa, Artificial sequence
  protein pattern
  Variant (4)..(4): Xaa in position 4 is Phe, Ile or Leu
  Variant (5)..(5): Xaa in position 5 is Phe, Ile, Leu or Val
  Variant (6)..(6): Xaa in position 6 is Ala or Ser
  Variant (9)..(9): Xaa in position 9 is any amino acid
  Variant (12)..(13): Xaa in position 12 to 13 is any amino acid
MANXXXRPXGGXXSD

SEQ ID NO: 1551 - DNA, 3366 bp, Arabidopsis thaliana
  CDS (1)..(3366)
atgccgatgggacgctttctatctttggtccgaggagactcggctgagtcacctcgtgagattacctcacagagtaatatcatcggcgatactggttctaatggttggcttattaggtttttcgattctgctttcttctgtgagtggattgctgttagttatctgtacaagcaccctcatgctggtgttagggattacttatgcaataggatgtatacgcttcccttatcaggtattgagagttatctcttccagatttgctacatgatggtgcacaaaccaagcccatcgcttgataagtttgttatagacatctgtggaaagtcactgaaaatcgcactgaaagtgcattggtttttgttggctgagctggaggatgctgacgataatgaaggcatcagcaggattcaagagaagtgtcaaattgcagctactttgatgggtgagtggtctcctctcatgcgtccacagaacgaggtctcaaccccagggagcaagaatcaggtcctaaatagacttttgtcatcaaaacagaagctcttctccttaaagctatctcctcccacccagaagtctttgtcattctcaccttcgccagggaccaacgtgcaggatgatggtagtcagttacctgctgaggacaataagatttttaagaaacttatcccaagtcctaaagtcagagatgctttaatgtttagaaagtcagctgacaaagatgatgaagagagtgaaaaggaaggattcttcaagaggctcttgagggacagcaaaggtgagggtgatgaaccaatacctaactcagagggtttctttaagcgccttttgaaagacaataaatcagaagatgaggacataacaaacagttccgaggggttcttcaagaggctcttgagtagtaaaggagaaagcgaggaattgacatcgagttcagatgggctgtttaaaaggttgttacgagataataagggagatgaagaggaattgggtgcaaattcagacagtttcttcaagagattgttacgggagagtaaaaacgaggacgaggagtcaaacccaaactcagaaggtttttttaagaaattattccgtgacagcaaacctgaagatgataaagttcctaaagaagtggatgatgaggacaaagatgggttccttaagaaacttttcagggaaaaaaatgatgacaaaagacatggtagtgaaaagaatgaagccaatggaacagtgtatgccgataagaaatctggtgaagaggatgagagggaggggtttttcaaaaaattctttaaggaaaaatctgatgacaagaaagacattgtcaaggttgatgacgggaatgaaagtgagggtgatgaatctccagaattttctcttttcaaaagattattccgtatacatcccgaagatgcaaaacctacttcagaaaatgaaaatagcagcaatggcttagttgaaagcagtcctgggacagaaaactttttccgcaagttgttcagagatcgtgaccaatctgttgaagattctgaactgtttggatcaaagaaacacaaggagaaacggccaggctcacctaaacagcgggatgatactccatctggtaagcccccgctaccaaacaatactgcatcacaattcaggaaaggggcttaccacgagtcgttggagtttgtacaagcgttatgtgaaacgtcatatggtttggtagatatctttcccatcgaagatcggaagattggtcttcgggagtctcttgcagagatcaattttcatttatcggaagctgaaatcactggaggaatttgttttccaatggggagaggagtttttcgtgtggtccatattcctgaagacgaatgcattcttttgaattctagggaaaaggcgccatacatgatctccgtagaagttttgaaagcagaaacacccagtgctaaagaatcatcgaactcccagaagctttctaaaggggggattccattggcaaacggggacgcattcttgcaaaagccacctccatgggcttatccactatggactactcaggaggtttatcgcaacagtgctgaccgaatgtcgttatccactgctcaagcaattgatcaagcgatgactcctaagtcagaggtgaaggtgaaacttgtcaatgtaagtctctcagtggaggatcgtacttcagctcttgaatcatttggcgatccaattgatgatgttctgggggaagccccaaggactgggctgaacaatgatcttgaatgggtaagggtggtcgtaacggctgacccaggacttagaatggaaagcattcctgatccatcagtcccacgtaaaaaggaacatcgtcgtgttccaagtactgttgccatggaggaagttagggctgctgcagcgaagggagaggcacctccaggccttcctctcaaaggggcgggtcaggattcgtcggatgcacaaccaagggccaatggtggaatgctgaaggaaggtgatgccttatcaggtgaactttgggagggaaagcgagacagaatacgtaaagcttcaatatatggaaagttacctggttgggacctgcgttctatcattgtgaagagcggtgacgactgtaggcaggagcatcttgctgtgcaactcatttctcacttttatgatatattccaggaagcaggtctacccctctggttacgtccttatgaagtcttggttacatcttcttatactgcccttatagaaacaattccagatacggcttctattcattctatcaaaagtagatatcccaacataacgagcctacgtgatttctttgttgcaaagtataaagaaaactctccaagttttaagctcgcccagaggaatttcgtggaaagtatggccggatattctttggtctgttaccttctgcaggtaaaagatcgtcataatggaaatcttctcttggatgaagagggtcacattatacacattgattttggttttatgctttcgaattctcctggtggcgtaaactttgagagtgccccgtttaagttaacccgtgaacttcttgaggtcatggactctgatgctgatggggttccaagtgagttctttgactatttcaaggtgctatgcattcaaggattccttacatgtagaaagcacgcggaacggattattctcttagttgaaatgttacaggattcgggtttcccttgcttcaaaggtggtccacgaaccattcaaaacctaagaaaaagattccatctaagtttaactgaagagcaatgtgtctcgttggtcctctctctcatcagcagtagcttagatgcttggcggacacgacaatatgattactaccaacgggtcttaaatggaatattgtga

SEQ ID NO: 1552 - protein, 1121 aa, Arabidopsis thaliana
MPMGRFLSLVRGDSAESPREITSQSNIIGDTGSNGWLIRFFDSAFFCEWIAVSYLYKHPHAGVRDYLCNRMYTLPLSGIESYLFQICYMMVHKPSPSLDKFVIDICGKSLKIALKVHWFLLAELEDADDNEGISRIQEKCQIAATLMGEWSPLMRPQNEVSTPGSKNQVLNRLLSSKQKLFSLKLSPPTQKSLSFSPSPGTNVQDDGSQLPAEDNKIFKKLIPSPKVRDALMFRKSADKDDEESEKEGFFKRLLRDSKGEGDEPIPNSEGFFKRLLKDNKSEDEDITNSSEGFFKRLLSSKGESEELTSSSDGLFKRLLRDNKGDEEELGANSDSFFKRLLRESKNEDEESNPNSEGFFKKLFRDSKPEDDKVPKEVDDEDKDGFLKKLFREKNDDKRHGSEKNEANGTVYADKKSGEEDEREGFFKKFFKEKSDDKKDIVKVDDGNESEGDESPEFSLFKRLFRIHPEDAKPTSENENSSNGLVESSPGTENFFRKLFRDRDQSVEDSELFGSKKHKEKRPGSPKQRDDTPSGKPPLPNNTASQFRKGAYHESLEFVQALCETSYGLVDIFPIEDRKIGLRESLAEINFHLSEAEITGGICFPMGRGVFRVVHIPEDECILLNSREKAPYMISVEVLKAETPSAKESSNSQKLSKGGIPLANGDAFLQKPPPWAYPLWTTQEVYRNSADRMSLSTAQAIDQAMTPKSEVKVKLVNVSLSVEDRTSALESFGDPIDDVLGEAPRTGLNNDLEWVRVVVTADPGLRMESIPDPSVPRKKEHRRVPSTVAMEEVRAAAAKGEAPPGLPLKGAGQDSSDAQPRANGGMLKEGDALSGELWEGKRDRIRKASIYGKLPGWDLRSIIVKSGDDCRQEHLAVQLISHFYDIFQEAGLPLWLRPYEVLVTSSYTALIETIPDTASIHSIKSRYPNITSLRDFFVAKYKENSPSFKLAQRNFVESMAGYSLVCYLLQVKDRHNGNLLLDEEGHIIHIDFGFMLSNSPGGVNFESAPFKLTRELLEVMDSDADGVPSEFFDYFKVLCIQGFLTCRKHAERIILLVEMLQDSGFPCFKGGPRTIQNLRKRFHLSLTEEQCVSLVLSLISSSLDAWRTRQYDYYQRVLNGIL

SEQ ID NO: 1553 - DNA, 3351 bp, Arabidopsis thaliana
  CDS (1)..(3351)
atgcagatggcacagtttctttcattggttcgaggtgattcgattgagtctcctcgtgagattacctcgcccagtaacctcatcagcgagtccggttcgaatgggtggcttatccgcttttttgattcttccttcttctgtgagtggattgcagtcagttatttgtacaagcaccagcattcgggtgtgagagattacttatgcaataggatgtatacgcttcctttatccggtatcgagagttatttgttccagatatgctacttgatggtgcacaaaccaagtccctcacttgataagtttgtgatagatatctgtgcaaagtcacttaagatagcattgaaagtgcattggtttttgttggcggaacttgaggattctgatgataatgaaggtattagtaggattcaagagaagtgccaaattgcagctactctggtgggtgagtggtcgcctcttatgcggccacataacgagccttcaactccagggagcaaggtccttaataagtttttgtcatcaaaacagaagctcttctctttgactttatctccacccacccagaagtctttactattctcacctacatcggggagcaacttgcaggatgatggtagtcagttatctgcggacgacaataagatttttaagagactaatcccaagtcctaaagttagagatgctttattgtttaggaagtcagctgacaaagaagacgaggaatgtgaaaaggatggatttttcaagagactcttgagggacagcagaggtgaggatgatgaacaaaggtcaaactcagagggtttctttaagcgacttttgaaagacaataagtcagaagaggaggagatatcaaacaattccgaggggttctttaagaggctaaggagtagtaaaggagatgaagaggaattgacatcgagttcagatggattctttaagagattgttacgagataataaaggagatgaagaggaattgggtgccaactcggagggtttcttcaagaagttattgcgggatagtaaaaatgaagacgaggagccaaatgcaaacacagaagggttcttcaagaaactttttcatgagagcaagaatgaggatgataaagtttctaacgcagtagatgatgaggaaaaagatgggtttcttaagaaacttttcaaagaaaagtttgatgagaaaagaaatggtaacgagaggaatgagacagatgaaaccgtgtatactgacgaaacatctggtgaagataacggaagggagggatttttcaaaaaattgtttaaagagaagtttgaagacaaaccaaacattggcaaagccgatgatgggaatgaaagcgaggatgacgaatcttcagaattctcactgttcagaagattgttccgtagacatccagaagacgtaaaaactactttaccaagtgaaaactgcagcaatggcggttttgttgaaagcagtcctgggacagaaaactttttccgcaaattgttcagagatcgtgacaggtctgttgaagattctgaactttttggctcaaagaaatataaggagaagtgtccaggttcacccaaaccgcagaataatactccatctaaaaagccccctctaccaaacaatactgcagcacagttcaggaaagggtcttaccacgagtctttagagtttgtacatgcattatgtgaaacgtcatatgatttggtagacatttttcccattgaagatcggaagaccgctcttcgtgagtctattgcagagatcaattcccatttagctcaggctgaaactactggaggaatctgttttccaatggggagaggagtttatcgtgttgttaatattcctgaagacgagtatgttcttttgaattctagggaaaaggtgccttatatgatatgtgtggaagttttgaaagcagaaacaccctgtggtgctaaaaccacatctacttcccttaagctttctaaaggaggcattccactggcaaacggggatgcattcttgcacaagccacctccatgggcttatccgctatctactgctcaggaggtttaccgtaacagtgcagaccgaatgtcattatcaactgttgaagcaattgatcaagcaatgactcataagtctgaggtaaaacttgtgaatgcatgtctctcggtggagacgcatagtaattcaaataccaaatcagtaagcagtggtgtgactggtgtcctgaggactggtttggaaagtgatcttgagtgggtcaggctggtgctgacggctgatccaggtcttagaatggaaagtattactgatccgaaaaccccacgtcgaaaggaacatcgtcgtgtttcaagtatagttgcctacgaggaagtaagggctgctgcagcgaagggagaggcacctccaggtcttcctctcaaaggggctggtcaggattcatcagatgcacaaccaatggccaatggtggcatgctgaaagcaggtgatgccttatctggtgaattttgggaggggaagcgactaagaattcgtaaagattcaatatatggcaacctaccaggttgggacttgcgctctatcattgtgaagagcggtgatgactgtcggcaggaacatcttgcggttcaacttatatctcatttttttgatatattccaggaagcagggcttcccctctggttacgtccttatgaagtcttggtgacatcttcatacactgcccttatagaaacaattccagatacggcttctattcattctattaaaagtagataccctaacatcacaagcctgcgtgatttttttgatgccaagtttaaagagaactctccaagttttaagcttgctcagaggaattttgttgagagcatggctggatattctttggtctgttaccttctgcagataaaagaccgtcataatggaaaccttctgatggatgaagaaggtcacattatacacattgatttcggctttatgctttcaaattctcctggtggcgtgaactttgagagtgccccatttaagctaactcgggaacttcttgaggtcatggattctgatgctgaagggcttccaagcgagttctttgactatttcaaggtgctatgcattcaaggattcctaacatgtcgaaaacacgcagaacggattattcttctcgtcgaaatgttacaggattcaggttttccttgcttcaaaggtggtccacgcaccattcagaatctaagaaaaaggttccatttaagtttaaccgaagagcaatgcgtctctttggtgctctctctaatcagcagcagcttagatgcttggcgaactcgacaatacgattactaccaaagggtgttgaatggaatacgatga

SEQ ID NO: 1554 - protein, 1116 aa, Arabidopsis thaliana
MQMAQFLSLVRGDSIESPREITSPSNLISESGSNGWLIRFFDSSFFCEWIAVSYLYKHQHSGVRDYLCNRMYTLPLSGIESYLFQICYLMVHKPSPSLDKFVIDICAKSLKIALKVHWFLLAELEDSDDNEGISRIQEKCQIAATLVGEWSPLMRPHNEPSTPGSKVLNKFLSSKQKLFSLTLSPPTQKSLLFSPTSGSNLQDDGSQLSADDNKIFKRLIPSPKVRDALLFRKSADKEDEECEKDGFFKRLLRDSRGEDDEQRSNSEGFFKRLLKDNKSEEEEISNNSEGFFKRLRSSKGDEEELTSSSDGFFKRLLRDNKGDEEELGANSEGFFKKLLRDSKNEDEEPNANTEGFFKKLFHESKNEDDKVSNAVDDEEKDGFLKKLFKEKFDEKRNGNERNETDETVYTDETSGEDNGREGFFKKLFKEKFEDKPNIGKADDGNESEDDESSEFSLFRRLFRRHPEDVKTTLPSENCSNGGFVESSPGTENFFRKLFRDRDRSVEDSELFGSKKYKEKCPGSPKPQNNTPSKKPPLPNNTAAQFRKGSYHESLEFVHALCETSYDLVDIFPIEDRKTALRESIAEINSHLAQAETTGGICFPMGRGVYRVVNIPEDEYVLLNSREKVPYMICVEVLKAETPCGAKTTSTSLKLSKGGIPLANGDAFLHKPPPWAYPLSTAQEVYRNSADRMSLSTVEAIDQAMTHKSEVKLVNACLSVETHSNSNTKSVSSGVTGVLRTGLESDLEWVRLVLTADPGLRMESITDPKTPRRKEHRRVSSIVAYEEVRAAAAKGEAPPGLPLKGAGQDSSDAQPMANGGMLKAGDALSGEFWEGKRLRIRKDSIYGNLPGWDLRSIIVKSGDDCRQEHLAVQLISHFFDIFQEAGLPLWLRPYEVLVTSSYTALIETIPDTASIHSIKSRYPNITSLRDFFDAKFKENSPSFKLAQRNFVESMAGYSLVCYLLQIKDRHNGNLLMDEEGHIIHIDFGFMLSNSPGGVNFESAPFKLTRELLEVMDSDAEGLPSEFFDYFKVLCIQGFLTCRKHAERIILLVEMLQDSGFPCFKGGPRTIQNLRKRFHLSLTEEQCVSLVLSLISSSLDAWRTRQYDYYQRVLNGIR

SEQ ID NO: 1555 - DNA, 3366 bp, Arabidopsis thaliana; identical to SEQ ID NO: 1551
  CDS (1)..(3366)

SEQ ID NO: 1556 - protein, 1121 aa, Arabidopsis thaliana; identical to SEQ ID NO: 1552

SEQ ID NO: 1557 - DNA, 3297 bp, Medicago truncatula
  CDS (1)..(3297)
atggtgcggttattagggttcgctcgcggttacgcagatgaacccagggaaattgagtcaaagtcaaacctgactagtgattctagtgaaaatggatggcttattaggttctttgattcatcgtttttttgcgaatggattgctgttagttacttgtacaagcatgatcatgccggggtgcgtgattatctttgtaatagaatgtatactcttcccttgacagggcttgagagttatttgtttcagatttgttatatgatgatacataagcctagtccgtcgttggataagtttgtcatagatatgtgttccaagtcgcttaagattgcattgaaagtgcattggtttttgatggcggagttggaggattctgatgataatgacgggattagtaggattcaggagaagtgtcagattgcagctactttgatgggtgagtggccgcctttgatacgacctcatactgaacctccgagtgctggaggtaaaagtcaagttttgaataggttgctttcgagtaaaaatcgtttattgtctttgacaacctcaccgccaaagtctttgtcattttcatcttcaccgggaaataatttgcaagaggatggaaatccactgtctcctgatgagaataggatatttaaaaagtttatgccaagtcctaaggttagagatgctttgctttttagaaagtcagcggataaagaggacggtgattctgaaaaggatgggtttttcaagagacttttaagagatagcaaaggtgatgatgagctcggccaaaaaattcgtgatgcatttcattttcggaagtcgtccgagaaagatgccttagactctgagaaagagaatttctttaaaaggttcttaagagacagtagggacagtactagaggcgatgaggaagaatctgaaaaggatggtttctttcaaaggatcttaagagaaagtagaagcgaagatgaggatgtgtcctcaagttcagaaggattttttaagaagttatttcgggatagtaagaatgattctgaggacaaaacggattcaaaaacagtggaagatgaagagaaagatggacttttccgaaagtttttccgggagaaattcgaagataagaaagatgcgcgtgacagaaatgacaatagaaatgttcctaattctgaagagaaatgtccaaagcctgatgaagaggatgaaaaagatgggtttttccggaaattcttcagggataaatttgaggacaagaaagacacaaaagataaaattgaagaaggtactgccaacggcgaggaagaagagccttctgaactttccttgttcaaaaggctattccgtgtgcaccctgaagacgacaaaagtagtccagtcaatgaaaatagcaataacggtggtttgattcaaagtagtccaggtacagagaattttttccgtaaattgttcaaagaccgtgaccgttcaattgaagattcagagctgctggggtcaaagaggcagaaagaggtcagacttcagagaagaatactgcaaaagcatcctgggtccccaatgccgcaaagtgaaaaatcgagcacaaagcccccattaccgatcaatccatctcagttccgtaaaggggcttaccatgactcgttggagtttgttcagtcattatgtgacacatcttatgggttagtggatgtatttccaactgaagatcgcaagagtgctcttcaagagtcacttagagagatcaatgtacatgtaacagaggttcagaatactggaggagtctgtttcccactgggaaagggcatgtatcgcgtgcttcatatgccagtagatgaagctgttctcttgaattctcgggagaaggcaccttacatgatatgcatcgaagttttgagatgtgaaatgccaagtaatttcaaggagacatccagttctcagaagctttctcaaggtggaattcctttggcaaatggagacgctttcttgcaaaaaccacccccttgggcttatccattatggacagcacaagaggtgtaccgtaatagcaatgataggatgtctagatcgactgctcaggcaattgaccaggcaatgactcatgtatctgagccaaaatttgttagcctgaatctgtcagtggaaacacggtataatgagggtgtatatgaagcatcaggagcagaacatgacagtgatctggaatgggtacgagtagtattgacagctgatcctggggttaggttggaagatattgaggataaagcaccatctcggaaaaaggaacatcgccgtgttccaagtacagtggcaatagaagaagtgaaggctgcggcagcaaaaggagaagcgcctcttggactccctttgaaaggtgctggccaagactcatcagattcacaactgagggctaatggaattacccccaaagccagtgatgccttgtctggtgaactttgggaggcaaagaaagatagagtacgcaaggcttctatatacgggaagttacctggttgggatttgcggtcgattattgtaaagagtggagatgattgcaggcaggagcatctggctgttcaacttatttctcacttctatgatattttccaagaagctggtctaccgctttggctgcgcccttatgaagttttgtgtacttcttcttataccgctctcattgaaacaataccagatacggcttctctacactcaatcaaaagtagatatcccaacatttcgagtttacgtgaattcttcgatgctaaatatgaagaaaattctccaagttttaaacttgcccagaggaactttgtcgagagtatggcaggatattccctggtgtgctactttctgcaggtgaaagataggcataacgggaacctcctattggacgaagaaggtcatatcatacatattgattttggcttcatgctatccaattcacctggtggggttaattttgaaagtgcaccttttaaattaacacgtgagcttcttgaggttatggattctgacgctgagggtgtgccaagcgagttctttgattattttaaggttttatgcattcaaggcttcctcacttgtcgcaagcatgctgagcgtattattcttcttgttgagatgttgcaggattcgggttttccctgctttaaaggtggtatacgtacgatacagaacttacgaaagcgattccatctcagtttaacagaagagcaatgtgtctccttggttctttctcttattagcagtagccttgatgcttggagaacacggcagtatgattattatcagagggttttgaatggaatattgtga

SEQ ID NO: 1558 - protein, 1098 aa, Medicago truncatula
MVRLLGFARGYADEPREIESKSNLTSDSSENGWLIRFFDSSFFCEWIAVSYLYKHDHAGVRDYLCNRMYTLPLTGLESYLFQICYMMIHKPSPSLDKFVIDMCSKSLKIALKVHWFLMAELEDSDDNDGISRIQEKCQIAATLMGEWPPLIRPHTEPPSAGGKSQVLNRLLSSKNRLLSLTTSPPKSLSFSSSPGNNLQEDGNPLSPDENRIFKKFMPSPKVRDALLFRKSADKEDGDSEKDGFFKRLLRDSKGDDELGQKIRDAFHFRKSSEKDALDSEKENFFKRFLRDSRDSTRGDEEESEKDGFFQRILRESRSEDEDVSSSSEGFFKKLFRDSKNDSEDKTDSKTVEDEEKDGLFRKFFREKFEDKKDARDRNDNRNVPNSEEKCPKPDEEDEKDGFFRKFFRDKFEDKKDTKDKIEEGTANGEEEEPSELSLFKRLFRVHPEDDKSSPVNENSNNGGLIQSSPGTENFFRKLFKDRDRSIEDSELLGSKRQKEVRLQRRILQKHPGSPMPQSEKSSTKPPLPINPSQFRKGAYHDSLEFVQSLCDTSYGLVDVFPTEDRKSALQESLREINVHVTEVQNTGGVCFPLGKGMYRVLHMPVDEAVLLNSREKAPYMICIEVLRCEMPSNFKETSSSQKLSQGGIPLANGDAFLQKPPPWAYPLWTAQEVYRNSNDRMSRSTAQAIDQAMTHVSEPKFVSLNLSVETRYNEGVYEASGAEHDSDLEWVRVVLTADPGVRLEDIEDKAPSRKKEHRRVPSTVAIEEVKAAAAKGEAPLGLPLKGAGQDSSDSQLRANGITPKASDALSGELWEAKKDRVRKASIYGKLPGWDLRSIIVKSGDDCRQEHLAVQLISHFYDIFQEAGLPLWLRPYEVLCTSSYTALIETIPDTASLHSIKSRYPNISSLREFFDAKYEENSPSFKLAQRNFVESMAGYSLVCYFLQVKDRHNGNLLLDEEGHIIHIDFGFMLSNSPGGVNFESAPFKLTRELLEVMDSDAEGVPSEFFDYFKVLCIQGFLTCRKHAERIILLVEMLQDSGFPCFKGGIRTIQNLRKRFHLSLTEEQCVSLVLSLISSSLDAWRTRQYDYYQRVLNGIL

SEQ ID NO: 1559 - DNA, 3363 bp, Arabidopsis thaliana
  CDS (1)..(3363)
atgcagatggcacagtttctttcattggttcgaggtgattcgattgagtctcctcgtgagattacctcgcccagtaacctcatcagcgagtccggttcgaatgggtggcttatccgcttttttgattcttccttcttctgtgagtggattgcagtcagttatttgtacaagcaccagcattcgggtgtgagagattacttatgcaataggatgtatacgcttcctttatccggtatcgagagttatttgttccagatatgctacttgatggtgcacaaaccaagtccctcacttgataagtttgtgatagatatctgtgcaaagtcacttaagatagcattgaaagtgcattggtttttgttggcggaacttgaggattctgatgataatgaaggtattagtaggattcaagagaagtgccaaattgcagctactctggtgggtgagtggtcgcctcttatgcggccacataacgagccttcaactccagggagcaaggtccttaataagtttttgtcatcaaaacagaagctcttctctttgactttatctccacccacccagaagtctttactattctcacctacatcggggagcaacttgcaggatgatggtagtcagttatctgcggacgacaataagatttttaagagactaatcccaagtcctaaagttagagatgctttattgtttaggaagtcagctgacaaagaagacgaggaatgtgaaaaggatggatttttcaagagactcttgagggacagcagaggtgaggatgatgaacaaaggtcaaactcagagggtttctttaagcgacttttgaaagacaataagtcagaagaggaggagatatcaaacaattccgaggggttctttaagaggctaaggagtagtaaaggagatgaagaggaattgacatcgagttcagatggattctttaagagattgttacgagataataaaggagatgaagaggaattgggtgccaactcggagggtttcttcaagaagttattgcgggatagtaaaaatgaagacgaggagccaaatgcaaacacagaagggttcttcaagaaactttttcatgagagcaagaatgaggatgataaagtttctaacgcagtagatgatgaggaaaaagatgggtttcttaagaaacttttcaaagaaaagtttgatgagaaaagaaatggtaacgagaggaatgagacagatgaaaccgtgtatactgacgaaacatctggtgaagataacggaagggagggatttttcaaaaaattgtttaaagagaagtttgaagacaaaccaaacattggcaaagccgatgatgggaatgaaagcgaggatgacgaatcttcagaattctcactgttcagaagattgttccgtagacatccagaagacgtaaaaactactttaccaagtgaaaactgcagcaatggcggttttgttgaaagcagtcctgggacagaaaactttttccgcaaattgttcagagatcgtgacaggtctgttgaagattctgaactttttggctcaaagaaatataaggagaagtgtccaggttcacccaaaccgcagaataatactccatctaaaaagccccctctaccaaacaatactgcagcacagttcaggaaagggtcttaccacgagtctttagagtttgtacatgcattatgtgaaacgtcatatgatttggtagacatttttcccattgaagatcggaagaccgctcttcgtgagtctattgcagagatcaattcccatttagctcaggctgaaactactggaggaatctgttttccaatggggagaggagtttatcgtgttgttaatattcctgaagacgagtatgttcttttgaattctagggaaaaggtgccttatatgatatgtgtggaagttttgaaagcagaaacaccctgtggtgctaaaaccacatctacttcccttaagctttctaaaggaggcattccactggcaaacggggatgcattcttgcacaagccacctccatgggcttatccgctatctactgctcaggaggtttaccgtaacagtgcagaccgaatgtcattatcaactgttgaagcaattgatcaagcaatgactcataagtctgaggtaaaacttgtgaatgcatgtctctcggtggagacgcatagtaattcaaataccaaatcagtaagcagtggtgtgactggtgtcctgaggactggtttggaaagtgatcttgagtgggtcaggctggtgctgacggctgatccaggtcttagaatggaaagtattactgatccgaaaaccccacgtcgaaaggaacatcgtcgtgtttcaagtatagttgcctacgaggaagtaagggctgctgcagcgaagggagaggcacctccaggtcttcctctcaaaggggctggtcaggattcatcagatgcacaaccaatggccaatggtggcatgctgaaagcaggtgatgccttatctggtgaattttgggaggggaagcgactaagaattcgtaaagattcaatatatggcaacctaccaggttgggacttgcgctctatcattgtgaagagcggtgatgactgtcggcaggaacatcttgcggttcaacttatatctcatttttttgatatattccaggaagcagggcttcccctctggttacgtccttatgaagtcttggtgacatcttcatacactgcccttatagaaacaattccagatacggcttctattcattctattaaaagtagataccctaacatcacaagcctgcgtgatttttttgatgccaagtttaaagagaactctccaagttttaagcttgctcagaggaattttgttgagagcatggctggatattctttggtctgttaccttctgcagataaaagaccgtcataatggaaaccttctgatggatgaagaaggtcacattatacacattgatttcggctttatgctttcaaattctcctggtggcgtgaactttgagagtgccccatttaagctaactcgggaacttcttgaggtcatggattctgatgctgaagggcttccaagcgagttctttgactatttcaaggtgctatgcattcaaggattcctaacatgtcgaaaacacgcagaacggattattcttctcgtcgaaatgttacaggattcaggttttccttgcttcaaaggtggtccacgcaccattcagaatctaagaaaaaggttccatttaagtttaaccgaagaggcaatgcgtctctttggtgctctctctaatcagcagcagcttagatgcttggcgaactcgacaatacgattactaccaaagggtgttgaatggaatacgatgatgttaatttaa

SEQ ID NO: 1560 - protein, 1120 aa, Arabidopsis thaliana
MQMAQFLSLVRGDSIESPREITSPSNLISESGSNGWLIRFFDSSFFCEWIAVSYLYKHQHSGVRDYLCNRMYTLPLSGIESYLFQICYLMVHKPSPSLDKFVIDICAKSLKIALKVHWFLLAELEDSDDNEGISRIQEKCQIAATLVGEWSPLMRPHNEPSTPGSKVLNKFLSSKQKLFSLTLSPPTQKSLLFSPTSGSNLQDDGSQLSADDNKIFKRLIPSPKVRDALLFRKSADKEDEECEKDGFFKRLLRDSRGEDDEQRSNSEGFFKRLLKDNKSEEEEISNNSEGFFKRLRSSKGDEEELTSSSDGFFKRLLRDNKGDEEELGANSEGFFKKLLRDSKNEDEEPNANTEGFFKKLFHESKNEDDKVSNAVDDEEKDGFLKKLFKEKFDEKRNGNERNETDETVYTDETSGEDNGREGFFKKLFKEKFEDKPNIGKADDGNESEDDESSEFSLFRRLFRRHPEDVKTTLPSENCSNGGFVESSPGTENFFRKLFRDRDRSVEDSELFGSKKYKEKCPGSPKPQNNTPSKKPPLPNNTAAQFRKGSYHESLEFVHALCETSYDLVDIFPIEDRKTALRESIAEINSHLAQAETTGGICFPMGRGVYRVVNIPEDEYVLLNSREKVPYMICVEVLKAETPCGAKTTSTSLKLSKGGIPLANGDAFLHKPPPWAYPLSTAQEVYRNSADRMSLSTVEAIDQAMTHKSEVKLVNACLSVETHSNSNTKSVSSGVTGVLRTGLESDLEWVRLVLTADPGLRMESITDPKTPRRKEHRRVSSIVAYEEVRAAAAKGEAPPGLPLKGAGQDSSDAQPMANGGMLKAGDALSGEFWEGKRLRIRKDSIYGNLPGWDLRSIIVKSGDDCRQEHLAVQLISHFFDIFQEAGLPLWLRPYEVLVTSSYTALIETIPDTASIHSIKSRYPNITSLRDFFDAKFKENSPSFKLAQRNFVESMAGYSLVCYLLQIKDRHNGNLLMDEEGHIIHIDFGFMLSNSPGGVNFESAPFKLTRELLEVMDSDAEGLPSEFFDYFKVLCIQGFLTCRKHAERIILLVEMLQDSGFPCFKGGPRTIQNLRKRFHLSLTEEAMRLFGALSNQQQLRCLANSTIRLLPKGVEWNTMMLI

SEQ ID NO: 1561 - DNA, 3627 bp, Oryza sativa
  CDS (1)..(3627)
atggtgcggcttctcgggctgcggagcctgagcttcgggccggaggagtcgccgcgggagatcacggtggcggggggcggcggcggcgacgcggcggcgcaccccgtggggagcagcggctggctcgttcgcttcttcgactccgccttcttctgcgagtggatcgccgtcagctacctctacaagcatgaccaccagggggtgcgcgactacctctgcaaccgcatgtacacgctgccgctgccggggctcgaggcctacctcttccaggtctgctacatgatggtgcacaagcccagcccgtcgctcgaccgcttcgtgatcgacacctgctccaagtcgctgcgcatcgccctcaaggtgcactggctgctagccgccgagctcgagctcgaggacaccgacgatttggatgggatcgacagggtgcaggagcagtgccaggctgcggcgaccgttcagggagagtggccacccctcgtccggcctgcgccgccgtcgccaattgccagcccacgcgggaaccccatgcttagcaggatacgctcatcgaagcagcgccttctgtcccttgcatcatcaccctcactcggcttgagtccccccgcaggtgcgagcaatgcagctgctgcagaggatgttgggggcagtggagtgaagcagccagcgacaccctcgtcagaggataacaagctactcaagagactaagcattggacctaaggtgcgtgatgcagcatcgttctttaggcgatccgtggagaaggatgatgagcaggacaaggaagggttctttaaaaggctgcttagagacagcaaggacaaggaggaagaggatggtgataaggaaggatttttcaagaggctgcttagtaaggagaaagagaacgaggaggaagaaggagatagagatggtttcctccgcaggttgcttagggacagcaaggacgaggacatggaattgacaccaagctcagagggtttattgaagcgactgttccgtgataaggaagataggcagggtgatgatgaagaaaaggaaggctttttccgcaggatatttaaggataagaatgaggagaggagagagagcctgcatggaaggcatggggatgaggaaagagtgggcaagagcttagaggatgatgataaagaagggttcttccgcaaaattttcaaagataaaaatgaggagaggaaagacggagggcatagtaagcaacaagatgataaggaaaagactgctgggaacatcgaagatgacaagagggatggttttttccggcaacttttcaaggagaaaaacgaagagaaaaaggaaggcaccacaccaaacaagaaagaggaggacgacaaaggacacaggaccatggatgatgaaaatttctttcgtaggcttttcaaggataagaatgaagagaaaaagggagctgctcatgacaggaatgatgatgataagtgtgaggaaggtgataaggaaaatttcttccgcaaattgtttaaagacaagcatgaggagaggagaagcgatgggctggataaacatgatgatgatggtaaggggactagtggtattgatgacgaggaaaattcagagtttttgtcgttccgcaggttgtttagagtgcaccctgaagatgctaagagtgggcatattgaaagttgtcagcctaacggtatttctgagggtagcccaggatcagagagctttttcaagcgactattccgagacagagatcgctcacttgaagactctgagctttttggttcaaagttattgaaagagaaaaactctgttcccactggaaacggtgataagcaaagtggcaaaccacctttaccaaacaacgcaatagcagagcttcggaaaggatgttactatgcttcattggagcttgtgcaatctttgtgtgatacatcttatggccttgtagacatatttcctatggaagatcgtaagattgcccttcgagagtctcttacagagatcaattcacagattgcttctactgagaaaaatggaggagtatgctttccgatgggaaagggcatatatcgagtggttcatatacctgaagatgaagctgttcttcttaactccagggaaaaagctccttatcttatatgtgttgaagttttgaaagcagaagcaccaagtcactccaaagggtcatcagatgttaacaaattgtcaaaaggtgggatacccttggctaatggagatgtgcagttgccaaagccacctccatgggcatatcctttgtggagtcggcatgaaacacaaaattatgaaacagacagaatgctgaagtctacctctcaggttattgaccaagctatggctcaattgtgggaggccaaagtaaaatttgtaaacgttagtttctcggttgagaaacttggtcgttcaaggagtgttgcaatttctgattcgggacataggtcacgacaatctacagcagattcaaatgagccttcaggagattcccaaccaattgctgatcagcctattgagtgggtaaaggttactttatctgcggttccaggagttaacatggatgatgttgatgacaatgaaccaacgcggaagaaggaccatcgccgcgttccaagtacaattgccatagaggaagtcaaggctgcagcattaaaaggagaagctccacctggtcttccactgaaaggagttggccagaatgctcaaaatatagaatctaaggcaactgatggtggagatcctaaaccaactgatgctttggctggtgaaatctgggctgtcaagagagagagaatacgacggtcttctgttcatggaaaattacctggctgggatctgcgttctgttattgtcaagagtggagatgattgccgacaagaacacctagctgtacagcttgttgcacacttatatgatatatatcaagaagctggtttaccactttggttgcgaccctatgaagttatcgtcacatctgcatatacagcgctaattgagactattcctgatacggcgtcaattcattccatcaagagtcggttccccgatatcacaagtctccgtgactactatgtagccaagtatgaagaaaattctccgaacttcaaacttgcccagagaaactttgtggaaagcatggctggatactcaatcctgtgctacctgctccaggtcaaggatcgtcacaatggaaatctcttgatagatgaggaagggcatataattcatattgattttggctttatgctttccaactctcctggaggggttaattttgaaagtgcaccatttaaactgacaagggagcttcttgaagtgatggattctgatgcagagggaacacccagtgagttctttgactacttcaaggttctatgcattcaagggttccttacttgccggaagcatgcagagcgtattatactactagtagaaatgttgcaggattccggcttcccttgctttaaaggtggtcctcgcactattcagaacttgaggaagaggtttcacttgagtcttactgaagagcaatgcgtgtctctggtgctttcacttatcagtagcagcatggatgcatggcgtactcggcagtatgattactaccagagagtattgaatgggattttatga

SEQ ID NO: 1562 - protein, 1208 aa, Oryza sativa
MVRLLGLRSLSFGPEESPREITVAGGGGGDAAAHPVGSSGWLVRFFDSAFFCEWIAVSYLYKHDHQGVRDYLCNRMYTLPLPGLEAYLFQVCYMMVHKPSPSLDRFVIDTCSKSLRIALKVHWLLAAELELEDTDDLDGIDRVQEQCQAAATVQGEWPPLVRPAPPSPIASPRGNPMLSRIRSSKQRLLSLASSPSLGLSPPAGASNAAAAEDVGGSGVKQPATPSSEDNKLLKRLSIGPKVRDAASFFRRSVEKDDEQDKEGFFKRLLRDSKDKEEEDGDKEGFFKRLLSKEKENEEEEGDRDGFLRRLLRDSKDEDMELTPSSEGLLKRLFRDKEDRQGDDEEKEGFFRRIFKDKNEERRESLHGRHGDEERVGKSLEDDDKEGFFRKIFKDKNEERKDGGHSKQQDDKEKTAGNIEDDKRDGFFRQLFKEKNEEKKEGTTPNKKEEDDKGHRTMDDENFFRRLFKDKNEEKKGAAHDRNDDDKCEEGDKENFFRKLFKDKHEERRSDGLDKHDDDGKGTSGIDDEENSEFLSFRRLFRVHPEDAKSGHIESCQPNGISEGSPGSESFFKRLFRDRDRSLEDSELFGSKLLKEKNSVPTGNGDKQSGKPPLPNNAIAELRKGCYYASLELVQSLCDTSYGLVDIFPMEDRKIALRESLTEINSQIASTEKNGGVCFPMGKGIYRVVHIPEDEAVLLNSREKAPYLICVEVLKAEAPSHSKGSSDVNKLSKGGIPLANGDVQLPKPPPWAYPLWSRHETQNYETDRMLKSTSQVIDQAMAQLWEAKVKFVNVSFSVEKLGRSRSVAISDSGHRSRQSTADSNEPSGDSQPIADQPIEWVKVTLSAVPGVNMDDVDDNEPTRKKDHRRVPSTIAIEEVKAAALKGEAPPGLPLKGVGQNAQNIESKATDGGDPKPTDALAGEIWAVKRERIRRSSVHGKLPGWDLRSVIVKSGDDCRQEHLAVQLVAHLYDIYQEAGLPLWLRPYEVIVTSAYTALIETIPDTASIHSIKSRFPDITSLRDYYVAKYEENSPNFKLAQRNFVESMAGYSILCYLLQVKDRHNGNLLIDEEGHIIHIDFGFMLSNSPGGVNFESAPFKLTRELLEVMDSDAEGTPSEFFDYFKVLCIQGFLTCRKHAERIILLVEMLQDSGFPCFKGGPRTIQNLRKRFHLSLTEEQCVSLVLSLISSSMDAWRTRQYDYYQRVLNGIL

SEQ ID NO: 1563 - DNA, 3366 bp, Arabidopsis thaliana
  CDS (1)..(3366)
atgccgatgggacgctttctatctttggtccgaggagactcggctgagtcacctcgtgagattacctcacagagtaatatcatcggcgatactggttctaatggttggcttattaggtttttcgattctgctttcttctgtgagtggattgctgttagttatctgtacaagcaccctcatgctggtgttagggattacttatgcaataggatgtatacgcttcccttatcaggtattgagagttatctcttccagatttgctacatgatggtgcacaaaccaagcccatcgcttgataagtttgttatagacatctgtggaaagtcactgaaaatcgcactgaaagctagttggtttttgttggctgagctggaggatgctgacgataatgaaggcatcagcaggattcaagagaagtgtcaaattgcagctactttgatgggtgagtggtctcctctcatgcgtccacagaacgaggtctcaaccccagggagcaagaatcaggtcctaaatagacttttgtcatcaaaacagaagctcttctccttaaagctatctcctcccacccagaagtctttgtcattctcaccttcgccagggaccaacgtgcaggatgatggtagtcagttacctgctgaggacaataagatttttaagaaacttatcccaagtcctaaagtcagagatgctttaatgtttagaaagtcagctgacaaagatgatgaagagagtgaaaaggaaggattcttcaagaggctcttgagggacagcaaaggtgagggtgatgaaccaatacctaactcagagggtttctttaagcgccttttgaaagacaataaatcagaagatgaggacataacaaacagttccgaggggttcttcaagaggctcttgagtagtaaaggagaaagcgaggaattgacatcgagttcagatgggctgtttaaaaggttgttacgagataataagggagatgaagaggaattgggtgcaaattcagacagtttcttcaagagattgttacgggagagtaaaaacgaggacgaggagtcaaacccaaactcagaaggtttttttaagaaattattccgtgacagcaaacctgaagatgataaagttcctaaagaagtggatgatgaggacaaagatgggttccttaagaaacttttcagggaaaaaaatgatgacaaaagacatggtagtgaaaagaatgaagccaatggaacagtgtatgccgataagaaatctggtgaagaggatgagagggaggggtttttcaaaaaattctttaaggaaaaatctgatgacaagaaagacattgtcaaggttgatgacgggaatgaaagtgagggtgatgaatctccagaattttctcttttcaaaagattattccgtatacatcccgaagatgcaaaacctacttcagaaaatgaaaatagcagcaatggcttagttgaaagcagtcctgggacagaaaactttttccgcaagttgttcagagatcgtgaccaatctgttgaagattctgaactgtttggatcaaagaaacacaaggagaaacggccaggctcacctaaacagcgggatgatactccatctggtaagcccccgctaccaaacaatactgcatcacaattcaggaaaggggcttaccacgagtcgttggagtttgtacaagcgttatgtgaaacgtcatatggtttggtagatatctttcccatcgaagatcggaagattggtcttcgggagtctcttgcagagatcaattttcatttatcggaagctgaaatcactggaggaatttgttttccaatggggagaggagtttttcgtgtggtccatattcctgaagacgaatgcattcttttgaattctagggaaaaggcgccatacatgatctccgtagaagttttgaaagcagaaacacccagtgctaaagaatcatcgaactcccagaagctttctaaaggggggattccattggcaaacggggacgcattcttgcaaaagccacctccatgggcttatccactatggactactcaggaggtttatcgcaacagtgctgaccgaatgtcgttatccactgctcaagcaattgatcaagcgatgactcctaagtcagaggtgaaggtgaaacttgtcaatgtaagtctctcagtggaggatcgtacttcagctcttgaatcatttggcgatccaattgatgatgttctgggggaagccccaaggactgggctgaacaatgatcttgaatgggtaagggtggtcgtaacggctgacccaggacttagaatggaaagcattcctgatccatcagtcccacgtaaaaaggaacatcgtcgtgttccaagtactgttgccatggaggaagttagggctgctgcagcgaagggagaggcacctccaggccttcctctcaaaggggcgggtcaggattcgtcggatgcacaaccaagggccaatggtggaatgctgaaggaaggtgatgccttatcaggtgaactttgggagggaaagcgagacagaatacgtaaagcttcaatatatggaaagttacctggttgggacctgcgttctatcattgtgaagagcggtgacgactgtaggcaggagcatcttgctgtgcaactcatttctcacttttatgatatattccaggaagcaggtctacccctctggttacgtccttatgaagtcttggttacatcttcttatactgcccttatagaaacaattccagatacggcttctattcattctatcaaaagtagatatcccaacataacgagcctacgtgatttctttgttgcaaagtataaagaaaactctccaagttttaagctcgcccagaggaatttcgtggaaagtatggccggatattctttggtctgttaccttctgcaggtaaaagatcgtcataatggaaatcttctcttggatgaagagggtcacattatacacattgattttggttttatgctttcgaattctcctggtggcgtaaactttgagagtgccccgtttaagttaacccgtgaacttcttgaggtcatggactctgatgctgatggggttccaagtgagttctttgactatttcaaggtgctatgcattcaaggattccttacatgtagaaagcacgcggaacggattattctcttagttgaaatgttacaggattcgggtttcccttgcttcaaaggtggtccacgaaccattcaaaacctaagaaaaagattccatctaagtttaactgaagagcaatgtgtctcgttggtcctctctctcatcagcagtagcttagatgcttggcggacacgacaatatgattactaccaacgggtcttaaatggaatattgtga

SEQ ID NO: 1564 - protein, 1121 aa, Arabidopsis thaliana
MPMGRFLSLVRGDSAESPREITSQSNIIGDTGSNGWLIRFFDSAFFCEWIAVSYLYKHPHAGVRDYLCNRMYTLPLSGIESYLFQICYMMVHKPSPSLDKFVIDICGKSLKIALKASWFLLAELEDADDNEGISRIQEKCQIAATLMGEWSPLMRPQNEVSTPGSKNQVLNRLLSSKQKLFSLKLSPPTQKSLSFSPSPGTNVQDDGSQLPAEDNKIFKKLIPSPKVRDALMFRKSADKDDEESEKEGFFKRLLRDSKGEGDEPIPNSEGFFKRLLKDNKSEDEDITNSSEGFFKRLLSSKGESEELTSSSDGLFKRLLRDNKGDEEELGANSDSFFKRLLRESKNEDEESNPNSEGFFKKLFRDSKPEDDKVPKEVDDEDKDGFLKKLFREKNDDKRHGSEKNEANGTVYADKKSGEEDEREGFFKKFFKEKSDDKKDIVKVDDGNESEGDESPEFSLFKRLFRIHPEDAKPTSENENSSNGLVESSPGTENFFRKLFRDRDQSVEDSELFGSKKHKEKRPGSPKQRDDTPSGKPPLPNNTASQFRKGAYHESLEFVQALCETSYGLVDIFPIEDRKIGLRESLAEINFHLSEAEITGGICFPMGRGVFRVVHIPEDECILLNSREKAPYMISVEVLKAETPSAKESSNSQKLSKGGIPLANGDAFLQKPPPWAYPLWTTQEVYRNSADRMSLSTAQAIDQAMTPKSEVKVKLVNVSLSVEDRTSALESFGDPIDDVLGEAPRTGLNNDLEWVRVVVTADPGLRMESIPDPSVPRKKEHRRVPSTVAMEEVRAAAAKGEAPPGLPLKGAGQDSSDAQPRANGGMLKEGDALSGELWEGKRDRIRKASIYGKLPGWDLRSIIVKSGDDCRQEHLAVQLISHFYDIFQEAGLPLWLRPYEVLVTSSYTALIETIPDTASIHSIKSRYPNITSLRDFFVAKYKENSPSFKLAQRNFVESMAGYSLVCYLLQVKDRHNGNLLLDEEGHIIHIDFGFMLSNSPGGVNFESAPFKLTRELLEVMDSDADGVPSEFFDYFKVLCIQGFLTCRKHAERIILLVEMLQDSGFPCFKGGPRTIQNLRKRFHLSLTEEQCVSLVLSLISSSLDAWRTRQYDYYQRVLNGIL

SEQ ID NO: 1565 - DNA, 3708 bp, Oryza sativa
  CDS (1)..(3708)
atggtgcggcttctcgggctgcggagcctgagcttcgggccggaggagtcgccgcgggagatcacggtggcggggggcggcggcggcgacgcggcggcgcaccccgtggggagcagcggctggctcgttcgcttcttcgactccgccttcttctgcgagtggatcgccgtcagctacctctacaagcatgaccaccagggggtgcgcgactacctctgcaaccgcatgtacacgctgccgctgccggggctcgaggcctacctcttccaggtctgctacatgatggtgcacaagcccagcccgtcgctcgaccgcttcgtgatcgacacctgctccaagtcgctgcgcatcgccctcaaggtgcactggctgctagccgccgagctcgagctcgaggacaccgacgatttggatgggatcgacagggtgcaggagcagtgccaggctgcggcgaccgttcagggagagtggccacccctcgtccggcctgcgccgccgtcgccaattgccagcccacgcgggaaccccatgcttagcaggatacgctcatcgaagcagcgccttctgtcccttgcatcatcaccctcactcggcttgagtccccccgcaggtgcgagcaatgcagctgctgcagaggatgttgggggcagtggagtgaagcagccagcgacaccctcgtcagaggataacaagctactcaagagactaagcattggacctaaggtgcgtgatgcagcatcgttctttaggcgatccgtggagaaggatgatgagcaggacaaggaagggttctttaaaaggctgcttagagacagcaaggacaaggaggaagaggatggtgataaggaaggatttttcaagaggctgcttagtaaggagaaagagaacgaggaggaagaaggagatagagatggtttcctccgcaggttgcttagggacagcaaggacgaggacatggaattgacaccaagctcagagggtttattgaagcgactgttccgtgataaggaagataggcagggtgatgatgaagaaaaggaaggctttttccgcaggatatttaaggataagaatgaggagaggagagagagcctgcatggaaggcatggggatgaggaaagagtgggcaagagcttagaggatgatgataaagaagggttcttccgcaaaattttcaaagataaaaatgaggagaggaaagacggagggcatagtaagcaacaagatgataaggaaaagactgctgggaacatcgaagatgacaagagggatggttttttccggcaacttttcaaggagaaaaacgaagagaaaaaggaaggcaccacaccaaacaagaaagaggaggacgacaaaggacacaggaccatggatgatgaaaatttctttcgtaggcttttcaaggataagaatgaagagaaaaagggagctgctcatgacaggaatgatgatgataagtgtgaggaaggtgataaggaaaatttcttccgcaaattgtttaaagacaagcatgaggagaggagaagcgatgggctggataaacatgatgatgatggttgtttagagtgcaccctgaagatgctaagagtgggcatattgaaagttgtcagcctaacgaaaaactctgttcccactggaaacggtgataagcaaagtggcaaaccacctttaccaaacaacgcaatagcagagcttcggaaaggatgttactatgcttcattggagcttgtgcaatctttgtgtgatacatcttatggccttgtagacatatttcctatggaagatcgtaagattgcccttcgagagtctcttacagagatcaattcacagattgcttctactgagaaaaatggaggagtatgctttccgatgggaaagggcatatatcgagtggttcatatacctgaagatgaagctgttcttcttaactccagggaaaaagctccttatcttatatgtgttgaagttttgaaagcagaagcaccaagtcactccaaagggtcatcagatgttaacaaattgtcaaaaggtgggatacccttggctaatggagatgtgcagttgccaaagccacctccatgggcatatcctttgtggagtcggcatgaaacacaaaattatgaaacagacagaatgctgaagtctacctctcaggttattgaccaagctatggctcaattgtgggaggccaaagtaaaatttgtaaacgttagtttctcggttgagaaacttggtcgttcaaggagtgttgcaatttctgattcgggacataggtcacgacaatctacagcagattcaaatgagccttcaggagattcccaaccaattgctgatcagcctattgagtgggtaaaggttactttatctgcggttccaggagttaacatggatgatgttgatgacaatgaaccaacgcggaagaaggaccatcgccgcgttccaagtacaattgccatagaggaagtcaaggctgcagcattaaaaggagaagctccacctggtcttccactgaaaggagttggccagaatgctcaaaatatagaatctaaggcaactgatggtggagatcctaaaccaactgatgctttggctggtgaaatctgggctgtcaagagagagagaatacgacggtcttctgttcatggaaaattacctggctgggatctgcgttctgttattgtcaagagtggagatgattgccgacaagaacacctagctgtacagcttgttgcacacttatatgatatatatcaagaagctggtttaccactttggttgcgaccctatgaagttatcgtcacatctgcatatacagcgctaattgagactattcctgatacggcgtcaattcattccatcaagagtcggttccccgatatcacaagtctccgtgactactatgtagccaagtatgaagaaaattctccgaacttcaaacttgcccagagaaactttgtggaaagcatggctggatactcaatcctgtgctacctgctccaggtcaaggatcgtcacaatggaaatctcttgatagatgaggaagggcatataattcatattgattttggctttatgctttccaactctcctggaggggttaattttgaaagtgcaccatttaaactgacaagggagcttcttgaagtgatggattctgatgcagagggaacacccagtgagttctttgactacttcaaggttctatgcattcaagggttccttacttgccggaagcatgcagagcgtattatactactagtagaaatgttgcaggattccggcttcccttgctttaaaggtggtcctcgcactattcagaacttgaggaagaggtttcacttgagtcttactgaagaggagcttctggctccttccaaaaatcaatttgcttatatcatcgtgaaaatctccgggatagcgcaggctattggcgcctgcaatgcaacttgcatagcatttctcccatttgatgaggttgagaattgtatagtcgtcggcagttatctagttgaggtcatactaggagcttggacaggatctaggagaggatggagccatacaagccgcaaagtgatagcatatgtttgggaattttctcccagctttgtcaacattacaccgcttgaaaactggaaatatttgagagtgcttccatctggtaatgtatctggacatatttctgaatctgtggagattattaactcttga

SEQ ID NO: 1566 - protein, 1235 aa, Oryza sativa
MVRLLGLRSLSFGPEESPREITVAGGGGGDAAAHPVGSSGWLVRFFDSAFFCEWIAVSYLYKHDHQGVRDYLCNRMYTLPLPGLEAYLFQVCYMMVHKPSPSLDRFVIDTCSKSLRIALKVHWLLAAELELEDTDDLDGIDRVQEQCQAAATVQGEWPPLVRPAPPSPIASPRGNPMLSRIRSSKQRLLSLASSPSLGLSPPAGASNAAAAEDVGGSGVKQPATPSSEDNKLLKRLSIGPKVRDAASFFRRSVEKDDEQDKEGFFKRLLRDSKDKEEEDGDKEGFFKRLLSKEKENEEEEGDRDGFLRRLLRDSKDEDMELTPSSEGLLKRLFRDKEDRQGDDEEKEGFFRRIFKDKNEERRESLHGRHGDEERVGKSLEDDDKEGFFRKIFKDKNEERKDGGHSKQQDDKEKTAGNIEDDKRDGFFRQLFKEKNEEKKEGTTPNKKEEDDKGHRTMDDENFFRRLFKDKNEEKKGAAHDRNDDDKCEEGDKENFFRKLFKDKHEERRSDGLDKHDDDGCLECTLKMLRVGILKVVSLTKNSVPTGNGDKQSGKPPLPNNAIAELRKGCYYASLELVQSLCDTSYGLVDIFPMEDRKIALRESLTEINSQIASTEKNGGVCFPMGKGIYRVVHIPEDEAVLLNSREKAPYLICVEVLKAEAPSHSKGSSDVNKLSKGGIPLANGDVQLPKPPPWAYPLWSRHETQNYETDRMLKSTSQVIDQAMAQLWEAKVKFVNVSFSVEKLGRSRSVAISDSGHRSRQSTADSNEPSGDSQPIADQPIEWVKVTLSAVPGVNMDDVDDNEPTRKKDHRRVPSTIAIEEVKAAALKGEAPPGLPLKGVGQNAQNIESKATDGGDPKPTDALAGEIWAVKRERIRRSSVHGKLPGWDLRSVIVKSGDDCRQEHLAVQLVAHLYDIYQEAGLPLWLRPYEVIVTSAYTALIETIPDTASIHSIKSRFPDITSLRDYYVAKYEENSPNFKLAQRNFVESMAGYSILCYLLQVKDRHNGNLLIDEEGHIIHIDFGFMLSNSPGGVNFESAPFKLTRELLEVMDSDAEGTPSEFFDYFKVLCIQGFLTCRKHAERIILLVEMLQDSGFPCFKGGPRTIQNLRKRFHLSLTEEELLAPSKNQFAYIIVKISGIAQAIGACNATCIAFLPFDEVENCIVVGSYLVEVILGAWTGSRRGWSHTSRKVIAYVWEFSPSFVNITPLENWKYLRVLPSGNVSGHISESVEIINS

SEQ ID NO: 1567 - DNA, 3339 bp, Glycine max
  CDS (1)..(3339)
atggtgaggtttttagggttgactcttggttatgctgaagaaccccgtgaaatagcatcgaggtcgagcctgaccagtgattctggtgaaaatgggtggctcatcaggttctttgactcggcattcttctgcgagtggattgctgttagctacttgtacaagcatgatcatgccggggtgcgtgattatctctgtaatagaatgtatactcttcctttgcaaggtgttgagagttatttgttccagatatgttacatgatgatacacaagcctagtccctccttggataagtatgtgatagacgtgtgctcgaagtcgcttaagattgctttgaaggtgcattggttcttgatggcggaacttgaggactctgatgataatgaagggattagtgggattcagaagaagtgtcagattgctgccaccttgatgggtgagtggccacctctaatacggcccctaactgaacccccgagtcccggaggcaaaagccaagttttgaataggttactgtcgtcgaaaaatctcttgttgtcactaacatcctcaccacctgctcaaaagcctttatcattttcaccgtcctcaggaaacaatttgcaagaggatgacaaaccactttctcctgatgagaataagatattcaagaagtttatgccgagcccgaaggttagagatgctttgctttttcggaagtcagtggacaaagacgatgatggttcggaaaaggatggttttttcaagaggcttttgagggatagcaaaggtgatgatgaactgggccaaaaaattcgtgattcatttctgtttaggaagtcgtctgtgaaagatgatgaagactctgaaaaggagaatttctttaaaaggttcttaagggacagtagaggtgacgatgaagactcggaaaaagatgatttctttcgaaggctcttaagggatagtagaagcgaagatgaagatgtagcttcaagttcagagggattatttaagaggttgtttcgtgacagcaagaatgattctgaggacagaacacgtactaaaacaatagaagatgaagataaagagggatttttccgaaagtttttccgggagaaatctgaagataggaaggatgggagtcataggaatgataatagagatgcggctaattttgaagagaaatatgccaaacctgctgaagaggatgaaaaagaagggtttttccggaaattatttaaggataaatctgaggacaagaaagatacaaatgataaaattgaagagggtactgccaatggtgaggaagaagagtcttctgagttttccttgttcagaagactatttcgcgtgcaccctgaagaggctaaaagtagtctgttcaatgaaaacaagaataatggcggtttatttgaaagtagtccaggtacagagaattttttccgtaaattgttcagagaccgtgaccgttcaattgaagattcagagctattgggttcaaaaagacagaaagagaagcatcctggatccccaaagcagcagagtgaaaagtcgagcacaaagcctccactaccaattagtttgtctcagttccggaaaggggcttatcatgactcattggagtttgtgcagtcattatgtgatacatcatatgggttagtggatgtatttcccattgaagatcgcaaaagtgctcttcgtgaggcacttgtagaaatcaatctacatgtagcagaggttcagaacactggaggagtttgttttccattgggaaagggcatgtatcgtgtgcttaatatacctgaagatgaagctgttctcttgaattctagggagaaggcaccttacctgatctgtgtagaggttttgagatgtgaaatgccaagtaattccaaggaggcatccagttctcagaaactttctcaagggggaatccctttggcaaatggagatgctctcatgcaaaaaccacctccttgggcttatccattacggacagcacaagaggtgtaccgcaatagcaacgataggatgtccagttcaactgctcatgcaattgaccaggcgatgactcatgtatctgaggcaaaaatcaaatttgttagtgtgaatttttctgtggaaatgcagttaaatggtcagccagaggagattgaagtggccgatctacacggtggcagtcatcgttctgcttcaattcatagagagggtgtgtatgatgcaacagctgcaggacatgtcagtgatttggaatgggtacgagtagtgttgacagccgatcctggggttagattggaagatattgaggatcaagcaccgcctcggaggaaggaacatcgccgtgttccaagtacggtggcaatagaggaagtaaaggctgcggcagctaaaggggaagcacctcttggactccctttgaaaggtgctggtcaagattcatccgatgcacaaccaagggttaatggaattactcccaaagccagcgatgccttgtctggtgaactttgggaggcaaagaaggataggatatgcaaggcttccatatatgggaagttacctggttgggacttgcgatctgttattgtaaagagtggtgatgattgcaggcaggagcatctggctgttcaacttatttctcacttctatgatattttccaagaagctggcctacccctctggctgcgcccatatgaagttttgtgtacttcatcttacacagctcttattgaaacaattccagatacggcttctctacactctatcaaaagtagatatcccaacatctcaagtttacgtgaattcttcaatgctaagtatcaagaaaattctcccagttttaaacttgcccagagaaactttgttgaaagtatggcaggatattccctggtgtgctactttctgcaggtgaaggataggcataatgggaacctcctattggatgaagaaggtcatatcatacatatcgattttggcttcatgctttccaattcacctggtggtgttaactttgaaagtgcacctttcaaattaacacgtgaacttcttgaggttatggattctgatgctgagggtgttccaagcgagttctttgattattttaaggttttatgcattcaaggcttccttacttgccgcaagcatgctgagcgcatcattcttcttgttgagatgttgcaggattcagatttcccatgctttaaaggtggtgctcggacaatacagaacctacgaaagcgattccatctcagtttaactgaagagcaatgtgtctccttggtgctttcactcattagcagcagcctggatgcttggaggacacggcagtatgattattatcagagggttttgaatggaatattatga

SEQ ID NO: 1568 - protein, 1112 aa, Glycine max
MVRFLGLTLGYAEEPREIASRSSLTSDSGENGWLIRFFDSAFFCEWIAVSYLYKHDHAGVRDYLCNRMYTLPLQGVESYLFQICYMMIHKPSPSLDKYVIDVCSKSLKIALKVHWFLMAELEDSDDNEGISGIQKKCQIAATLMGEWPPLIRPLTEPPSPGGKSQVLNRLLSSKNLLLSLTSSPPAQKPLSFSPSSGNNLQEDDKPLSPDENKIFKKFMPSPKVRDALLFRKSVDKDDDGSEKDGFFKRLLRDSKGDDELGQKIRDSFLFRKSSVKDDEDSEKENFFKRFLRDSRGDDEDSEKDDFFRRLLRDSRSEDEDVASSSEGLFKRLFRDSKNDSEDRTRTKTIEDEDKEGFFRKFFREKSEDRKDGSHRNDNRDAANFEEKYAKPAEEDEKEGFFRKLFKDKSEDKKDTNDKIEEGTANGEEEESSEFSLFRRLFRVHPEEAKSSLFNENKNNGGLFESSPGTENFFRKLFRDRDRSIEDSELLGSKRQKEKHPGSPKQQSEKSSTKPPLPISLSQFRKGAYHDSLEFVQSLCDTSYGLVDVFPIEDRKSALREALVEINLHVAEVQNTGGVCFPLGKGMYRVLNIPEDEAVLLNSREKAPYLICVEVLRCEMPSNSKEASSSQKLSQGGIPLANGDALMQKPPPWAYPLRTAQEVYRNSNDRMSSSTAHAIDQAMTHVSEAKIKFVSVNFSVEMQLNGQPEEIEVADLHGGSHRSASIHREGVYDATAAGHVSDLEWVRVVLTADPGVRLEDIEDQAPPRRKEHRRVPSTVAIEEVKAAAAKGEAPLGLPLKGAGQDSSDAQPRVNGITPKASDALSGELWEAKKDRICKASIYGKLPGWDLRSVIVKSGDDCRQEHLAVQLISHFYDIFQEAGLPLWLRPYEVLCTSSYTALIETIPDTASLHSIKSRYPNISSLREFFNAKYQENSPSFKLAQRNFVESMAGYSLVCYFLQVKDRHNGNLLLDEEGHIIHIDFGFMLSNSPGGVNFESAPFKLTRELLEVMDSDAEGVPSEFFDYFKVLCIQGFLTCRKHAERIILLVEMLQDSDFPCFKGGARTIQNLRKRFHLSLTEEQCVSLVLSLISSSLDAWRTRQYDYYQRVLNGIL

SEQ ID NO: 1569 - DNA, 31 bp, Artificial sequence
  primer
atagagctcacctcgtgagattacctcacag

SEQ ID NO: 1570 - DNA, 33 bp, Artificial sequence
  primer
atacccgggatgcactttcagtgcgattttcag

SEQ ID NO: 1571 - DNA, 23 bp, Artificial sequence
  primer
atgccgatgggacgctttctatc

SEQ ID NO: 1572 - DNA, 23 bp, Artificial sequence
  primer
tcacaatattccatttaagaccc

SEQ ID NO: 1573 - DNA, 31 bp, Artificial sequence
  primer
ataccatggacctcgtgagattacctcacag

SEQ ID NO: 1574 - DNA, 35 bp, Artificial sequence
  primer
atattaattaaatgcactttcagtgcgattttcag

SEQ ID NO: 1575 - DNA, 31 bp, Artificial sequence
  primer
ataggtaccacctcgtgagattacctcacag

SEQ ID NO: 1576 - DNA, 33 bp, Artificial sequence
  primer
atagtcgacatgcactttcagtgcgattttcag

SEQ ID NO: 1577 - protein, 1327 aa, Artificial sequence
  consensus sequence
  Variant (2)..(4): Xaa in position 2 to 4 is any amino acid
  Variant (6)..(6): Xaa in position 6 is any amino acid
  Variant (8)..(12): Xaa in position 8 to 12 is any amino acid
  Variant (13)..(15): Xaa in position 13 to 15 is any or no amino acid
  Variant (17)..(17): Xaa in position 17 is any amino acid
  Variant (22)..(31): Xaa in position 22 to 31 is any amino acid
  Variant (32)..(36): Xaa in position 32 to 36 is any or no amino acid
  Variant (38)..(39): Xaa in position 38 to 39 is any amino acid
  Variant (43)..(43): Xaa in position 43 is any amino acid
  Variant (49)..(49): Xaa in position 49 is any amino acid
  Variant (64)..(64): Xaa in position 64 is any amino acid
  Variant (66)..(66): Xaa in position 66 is any amino acid
  Variant (82)..(82): Xaa in position 82 is any amino acid
  Variant (84)..(84): Xaa in position 84 is any amino acid
  Variant (86)..(86): Xaa in position 86 is any amino acid
  Variant (91)..(91): Xaa in position 91 is any amino acid
  Variant (94)..(94): Xaa in position 94 is any amino acid
  Variant (96)..(96): Xaa in position 96 is any amino acid
  Variant (105)..(105): Xaa in position 105 is any amino acid
  Variant (110)..(110): Xaa in position 110 is any amino acid
  Variant (112)..(112): Xaa in position 112 is any amino acid
  Variant (116)..(116): Xaa in position 116 is any amino acid
  Variant (124)..(124): Xaa in position 124 is any amino acid
  Variant (126)..(126): Xaa in position 126 is any amino acid
  Variant (131)..(132): Xaa in position 131 to 132 is any amino acid
  Variant (134)..(134): Xaa in position 134 is any amino acid
  Variant (137)..(138): Xaa in position 137 to 138 is any amino acid
  Variant (141)..(141): Xaa in position 141 is any amino acid
  Variant (143)..(143): Xaa in position 143 is any amino acid
  Variant (146)..(146): Xaa in position 146 is any amino acid
  Variant (149)..(149): Xaa in position 149 is any amino acid
  Variant (153)..(154): Xaa in position 153 to 154 is any amino acid
  Variant (158)..(158): Xaa in position 158 is any amino acid
  Variant (161)..(161): Xaa in position 161 is any amino acid
  Variant (164)..(174): Xaa in position 164 to 174 is any amino acid
  Variant (175)..(177): Xaa in position 175 to 177 is any or no amino acid
  Variant (179)..(182): Xaa in position 179 to 182 is any amino acid
  Variant (186)..(187): Xaa in position 186 to 187 is any amino acid
  Variant (189)..(189): Xaa in position 189 is any amino acid
  Variant (192)..(193): Xaa in position 192 to 193 is any amino acid
  Variant (196)..(197): Xaa in position 196 to 197 is any amino acid
  Variant (198)..(199): Xaa in position 198 to 199 is any or no amino acid
  Variant (201)..(214): Xaa in position 201 to 214 is any amino acid
  Variant (216)..(222): Xaa in position 216 to 222 is any amino acid
  Variant (223)..(229): Xaa in position 223 to 229 is any or no amino acid
  Variant (232)..(233): Xaa in position 232 to 233 is any amino acid
  Variant (235)..(239): Xaa in position 235 to 239 is any amino acid
  Variant (246)..(247): Xaa in position 246 to 247 is any amino acid
  Variant (248)..(248): Xaa in position 248 is any or no amino acid
  Variant (251)..(251): Xaa in position 251 is any amino acid
  Variant (253)..(254): Xaa in position 253 to 254 is any amino acid
  Variant (256)..(256): Xaa in position 256 is any amino acid
  Variant (258)..(260): Xaa in position 258 to 260 is any amino acid
  Variant (261)..(261): Xaa in position 261 is any or no amino acid
  Variant (263)..(263): Xaa in position 263 is any amino acid
  Variant (274)..(285): Xaa in position 274 to 285 is any amino acid
  Variant (286)..(308): Xaa in position 286 to 308 is any or no amino acid
  Variant (310)..(311): Xaa in position 310 to 311 is any amino acid
  Variant (313)..(314): Xaa in position 313 to 314 is any amino acid
  Variant (316)..(329): Xaa in position 316 to 329 is any amino acid
  Variant (330)..(332): Xaa in position 330 to 332 is any or no amino acid
  Variant (334)..(334): Xaa in position 334 is any amino acid
  Variant (338)..(343): Xaa in position 338 to 343 is any amino acid
  Variant (344)..(347): Xaa in position 344 to 347 is any or no amino acid
  Variant (349)..(357): Xaa in position 349 to 357 is any amino acid
  Variant (358)..(359): Xaa in position 358 to 359 is any or no amino acid
  Variant (361)..(361): Xaa in position 361 is any amino acid
  Variant (363)..(374): Xaa in position 363 to 374 is any amino acid
  Variant (375)..(375): Xaa in position 375 is any or no amino acid
  Variant (380)..(382): Xaa in position 380 to 382 is any amino acid
  Variant (384)..(398): Xaa in position 384 to 398 is any amino acid
  Variant (399)..(409): Xaa in position 399 to 409 is any or no amino acid
  Variant (411)..(412): Xaa in position 411 to 412 is any amino acid
  Variant (414)..(414): Xaa in position 414 is any amino acid
  Variant (417)..(418): Xaa in position 417 to 418 is any amino acid
  Variant (420)..(420): Xaa in position 420 is any amino acid
  Variant (422)..(423): Xaa in position 422 to 423 is any amino acid
  Variant (425)..(430): Xaa in position 425 to 430 is any amino acid
  Variant (432)..(447): Xaa in position 432 to 447 is any amino acid
  Variant (448)..(451): Xaa in position 448 to 451 is any or no amino acid
  Variant (453)..(457): Xaa in position 453 to 457 is any amino acid
  Variant (461)..(463): Xaa in position 461 to 463 is any amino acid
  Variant (466)..(466): Xaa in position 466 is any amino acid
  Variant (468)..(470): Xaa in position 468 to 470 is any amino acid
  Variant (472)..(493): Xaa in position 472 to 493 is any amino acid
  Variant (494)..(495): Xaa in position 494 to 495 is any or no amino acid
  Variant (497)..(497): Xaa in position 497 is any amino acid
  Variant (501)..(504): Xaa in position 501 to 504 is any amino acid
  Variant (506)..(507): Xaa in position 506 to 507 is any amino acid
  Variant (509)..(514): Xaa in position 509 to 514 is any amino acid
  Variant (516)..(525): Xaa in position 516 to 525 is any amino acid
  Variant (526)..(528): Xaa in position 526 to 528 is any or no amino acid
  Variant (537)..(537): Xaa in position 537 is any amino acid
  Variant (539)..(547): Xaa in position 539 to 547 is any amino acid
  Variant (549)..(561): Xaa in position 549 to 561 is any amino acid
  Variant (562)..(635): Xaa in position 562 to 635 is any or no amino acid
  Variant (637)..(643): Xaa in position 637 to 643 is any amino acid
  Variant (645)..(645): Xaa in position 645 is any amino acid
  Variant (651)..(656): Xaa in position 651 to 656 is any amino acid
  Variant (657)..(657): Xaa in position 657 is any or no amino acid
  Variant (661)..(661): Xaa in position 661 is any amino acid
  Variant (663)..(664): Xaa in position 663 to 664 is any amino acid
  Variant (668)..(668): Xaa in position 668 is any amino acid
  Variant (670)..(671): Xaa in position 670 to 671 is any amino acid
  Variant (674)..(674): Xaa in position 674 is any amino acid
  Variant (678)..(678): Xaa in position 678 is any amino acid
  Variant (682)..(682): Xaa in position 682 is any amino acid
  Variant (685)..(685): Xaa in position 685 is any amino acid
  Variant (690)..(691): Xaa in position 690 to 691 is any amino acid
  Variant (696)..(697): Xaa in position 696 to 697 is any amino acid
  Variant (701)..(709): Xaa in position 701 to 709 is any amino acid
  Variant (712)..(712): Xaa in position 712 is any amino acid
  Variant (716)..(716): Xaa in position 716 is any amino acid
  Variant (718)..(718): Xaa in position 718 is any amino acid
  Variant (720)..(721): Xaa in position 720 to 721 is any amino acid
  Variant (724)..(725): Xaa in position 724 to 725 is any amino acid
  Variant (731)..(732): Xaa in position 731 to 732 is any amino acid
  Variant (740)..(740): Xaa in position 740 is any amino acid
  Variant (743)..(743): Xaa in position 743 is any amino acid
  Variant (745)..(745): Xaa in position 745 is any amino acid
  Variant (750)..(751): Xaa in position 750 to 751 is any amino acid
  Variant (753)..(753): Xaa in position 753 is any amino acid
  Variant (755)..(756): Xaa in position 755 to 756 is any amino acid
  Variant (757)..(757): Xaa in position 757 is any or no amino acid
  Variant (759)..(760): Xaa in position 759 to 760 is any amino acid
  Variant (762)..(764): Xaa in position 762 to 764 is any amino acid
  Variant (768)..(768): Xaa in position 768 is any amino acid
  Variant (778)..(779): Xaa in position 778 to 779 is any amino acid
  Variant (781)..(781): Xaa in position 781 is any amino acid
  Variant (791)..(794): Xaa in position 791 to 794 is any amino acid
  Variant (796)..(801): Xaa in position 796 to 801 is any amino acid
  Variant (805)..(806): Xaa in position 805 to 806 is any amino acid
  Variant (809)..(811): Xaa in position 809 to 811 is any amino acid
  Variant (817)..(822): Xaa in position 817 to 822 is any amino acid
  Variant (823)..(824): Xaa in position 823 to 824 is any or no amino acid
  Variant (826)..(826): Xaa in position 826 is any amino acid
  Variant (828)..(831): Xaa in position 828 to 831 is any amino acid
  Variant (835)..(853): Xaa in position 835 to 853 is any amino acid
  Variant (854)..(876): Xaa in position 854 to 876 is any or no amino acid
  Variant (880)..(884): Xaa in position 880 to 884 is any amino acid
  Variant (886)..(886): Xaa in position 886 is any amino acid
  Variant (889)..(895): Xaa in position 889 to 895 is any amino acid
  Variant (897)..(900): Xaa in position 897 to 900 is any amino acid
  Variant (902)..(902): Xaa in position 902 is any amino acid
  Variant (904)..(904): Xaa in position 904 is any amino acid
  Variant (909)..(909): Xaa in position 909 is any amino acid
  Variant (911)..(912): Xaa in position 911 to 912 is any amino acid
  Variant (914)..(914): Xaa in position 914 is any amino acid
  Variant (918)..(918): Xaa in position 918 is any amino acid
  Variant (922)..(922): Xaa in position 922 is any amino acid
  Variant (928)..(928): Xaa in position 928 is any amino acid
  Variant (935)..(935): Xaa in position 935 is any amino acid
  Variant (938)..(945): Xaa in position 938 to 945 is any amino acid
  Variant (947)..(947): Xaa in position 947 is any amino acid
  Variant (948)..(948): Xaa in position 948 is any or no amino acid
  Variant (950)..(952): Xaa in position 950 to 952 is any amino acid
  Variant (954)..(955): Xaa in position 954 to 955 is any amino acid
  Variant (959)..(959): Xaa in position 959 is any amino acid
  Variant (962)..(962): Xaa in position 962 is any amino acid
  Variant (964)..(965): Xaa in position 964 to 965 is any amino acid
  Variant (967)..(968): Xaa in position 967 to 968 is any amino acid
  Variant (972)..(973): Xaa in position 972 to 973 is any amino acid
  Variant (975)..(976): Xaa in position 975 to 976 is any amino acid
  Variant (978)..(978): Xaa in position 978 is any amino acid
  Variant (987)..(987): Xaa in position 987 is any amino acid
  Variant (1005)..(1006): Xaa in position 1005 to 1006 is any amino acid
  Variant (1008)..(1009): Xaa in position 1008 to 1009 is any amino acid
  Variant (1012)..(1012): Xaa in position 1012 is any amino acid
  Variant (1027)..(1028): Xaa in position 1027 to 1028 is any amino acid
  Variant (1031)..(1031): Xaa in position 1031 is any amino acid
  Variant (1045)..(1045): Xaa in position 1045 is any amino acid
  Variant (1052)..(1052): Xaa in position 1052 is any amino acid
  Variant (1054)..(1054): Xaa in position 1054 is any amino acid
  Variant (1056)..(1056): Xaa in position 1056 is any amino acid
  Variant (1060)..(1063): Xaa in position 1060 to 1063 is any amino acid
  Variant (1066)..(1067): Xaa in position 1066 to 1067 is any amino acid
  Variant (1072)..(1072): Xaa in position 1072 is any amino acid
  Variant (1089)..(1090): Xaa in position 1089 to 1090 is any amino acid
  Variant (1093)..(1093): Xaa in position 1093 is any amino acid
  Variant (1096)..(1096): Xaa in position 1096 is any amino acid
  Variant (1106)..(1106): Xaa in position 1106 is any amino acid
  Variant (1150)..(1150): Xaa in position 1150 is any amino acid
  Variant (1152)..(1152): Xaa in position 1152 is any amino acid
  Variant (1197)..(1197): Xaa in position 1197 is any amino acid
  Variant (1215)..(1219): Xaa in position 1215 to 1219 is any amino acid
  Variant (1220)..(1258): Xaa in position 1220 to 1258 is any or no amino acid
  Variant (1260)..(1261): Xaa in position 1260 to 1261 is any amino acid
  Variant (1262)..(1263): Xaa in position 1262 to 1263 is any or no amino acid
  Variant (1265)..(1268): Xaa in position 1265 to 1268 is any amino acid
  Variant (1270)..(1270): Xaa in position 1270 is any amino acid
  Variant (1273)..(1282): Xaa in position 1273 to 1282 is any amino acid
  Variant (1283)..(1310): Xaa in position 1283 to 1310 is any or no amino acid
  Variant (1314)..(1314): Xaa in position 1314 is any amino acid
  Variant (1315)..(1326): Xaa in position 1315 to 1326 is any or no amino acid
MXXXLXLXXXXXXXXEXPREIXXXXXXXXXXXXXXXGXXGWLXRFFDSXFFCEWIAVSYLYKHXHXGVRDYLCNRMYTLPLXGXEXYLFQXCYXMXHKPSPSLDXFVIDXCXKSLXIALKVHWXLXAELEXXDXDDXXGIXRXQEXCQXAATXXGEWXPLXRPXXXXXXXXXXXXXXLXXXXSSKXXLXSLXXSPXXXXSXXXXXXXXXXXXXXGXXXXXXXXXXXXXXNKXXKXXXXXPKVRDAXXXFRXSXXKXDXXXXKXGFFKRLLRDSXXXXXXXXXXXXXXXXXXXXXXXXXXXXXXXXXXXFXXRXXSXXXXXXXXXXXXXXXXXRXLRDXXXXXXXXXXEXXXXXXXXXXXLXRXXXXXXXXXXXXXEGFFXXXFXXXXXXXXXXXXXXXXXXXXXXXXXXDXXKXGFXXKXFXXKXXXXXXGXXXXXXXXXXXXXXXXXXXXEXXXXXGFFXXXFKXKXXXKXXXXXXXXXXXXXXXXXXXXXXXXFXRLFXXXXEXXKXXXXXXNXXXXXXXXXXXXXENFFRKLFXDXXXXXXXXXLXXXXXXXXXXXXXXXXXXXXXXXXXXXXXXXXXXXXXXXXXXXXXXXXXXXXXXXXXXXXXXXXXXXXXXXXXXXXXXXXXXXXXXXPXXXXXXXSXKPPLPXXXXXXXRKGXYXXSLEXVXXLCXTSYXLVDXFPXEDRKXXLRESXXEINXXXXXXXXXGGXCFPXGXGXXRVXXIPEDEXXLLNSREKXPYXIXVEVLXXEXPXXXKXXSXXXKLSXGGIPLANGDXXLXKPPPWAYPLXXXXEXXXXXXDRMXXSTXXXIDQAMXXXXXXXXKXVXXXXSVEXXXXXXXXXXXXXXXXXXXXXXXXXXXXXXXXXXXXXXXXXXEWVXXXXXAXPGXXXXXXXDXXXXRXKXHRRVXSXXAXEEVXAAAXKGEAPXGLPLKGXGQXXXXXXXXAXXGXXXKXXDALXGEXWXXKXXRIRXXSXXGXLPGWDLRSXIVKSGDDCRQEHLAVQLXXHXXDIXQEAGLPLWLRPYEVXXTSXYTALIETIPDTASXHSIKSRXPXIXSLRXXXXAKXXENSPXFKLAQRNFVESMAGYSXXCYXLQXKDRHNGNLLXDEEGHIIHIDFGFMLSNSPGGVNFESAPFKLTRELLEVMDSDAXGXPSEFFDYFKVLCIQGFLTCRKHAERIILLVEMLQDSGFPCFKGGXRTIQNLRKRFHLSLTEEXXXXXXXXXXXXXXXXXXXXXXXXXXXXXXXXXXXXXXXXXXXXVXXXXLXXXXLXAWXXXXXXXXXXXXXXXXXXXXXXXXXXXXXXXXXXXXXXVLNXXXXXXXXXXXXXI

SEQ ID NO: 1578 - protein, 61 aa, Artificial sequence
  protein pattern
  Variant (4)..(4): Xaa in position 4 is Ile or Val
  Variant (10)..(10): Xaa in position 10 is Ala or Ser
  Variant (25)..(25): Xaa in position 25 is Asp, Pro or Gln
  Variant (27)..(27): Xaa in position 27 is Ala, Gln or Ser
  Variant (43)..(43): Xaa in position 43 is Pro, Ser or Thr
  Variant (45)..(45): Xaa in position 45 is Ile or Leu
  Variant (47)..(47): Xaa in position 47 is Ala or Ser
  Variant (52)..(52): Xaa in position 52 is Ile or Val
  Variant (55)..(55): Xaa in position 55 is any or no amino acid
  Variant (57)..(57): Xaa in position 57 is any amino acid
  Variant (58)..(58): Xaa in position 58 is any or no amino acid
GWLXRFFDSXFFCEWIAVSYLYKHXHXGVRDYLCNRMYTLPLXGXEXYLFQXCYXMXXHKP

SEQ ID NO: 1579 - protein, 59 aa, Artificial sequence
  protein pattern
  Variant (41)..(41): Xaa in position 41 is Ile or Pro
  Variant (59)..(59): Xaa in position 59 is Ala, Glu or Gln
FDYFKVLCIQGFLTCRKHAERIILLVEMLQDSGFPCFKGGXRTIQNLRKRFHLSLTEEX

SEQ ID NO: 1580 - protein, 56 aa, Artificial sequence
  protein pattern
  Variant (8)..(8): Xaa in position 8 is Ile or Val
  Variant (9)..(9): Xaa in position 9 is Ala or Ser
  Variant (11)..(11): Xaa in position 11 is Phe or Leu
  Variant (12)..(12): Xaa in position 12 is Phe or Tyr
  Variant (15)..(15): Xaa in position 15 is Phe or Tyr
  Variant (30)..(30): Xaa in position 30 is Ile or Leu
  Variant (31)..(31): Xaa in position 31 is Cys or Val
  Variant (34)..(34): Xaa in position 34 is Ala or Ser
  Variant (48)..(48): Xaa in position 48 is Ile or Leu
  Variant (55)..(55): Xaa in position 55 is Phe or Tyr
EHLAVQLXXHXXDIXQEAGLPLWLRPYEVXXTSXYTALIETIPDTASXHSIKSRXP

SEQ ID NO: 1581 - protein, 61 aa, Artificial sequence
  protein pattern
  Variant (14)..(14): Xaa in position 14 is Ile or Leu
  Variant (15)..(15): Xaa in position 15 is Leu or Val
  Variant (18)..(18): Xaa in position 18 is any or no amino acid
  Variant (20)..(20): Xaa in position 20 is any or no amino acid
  Variant (22)..(22): Xaa in position 22 is Ile or Val
  Variant (32)..(32): Xaa in position 32 is Ile, Leu or Met
AQRNFVESMAGYSXXCYXLXQXKDRHNGNLLXDEEGHIIHIDFGFMLSNSPGGVNFESAPF

SEQ ID NO: 1582 - protein, 57 aa, Artificial sequence
  protein pattern
  Variant (2)..(2): Xaa in position 2 is any amino acid
  Variant (12)..(12): Xaa in position 12 is Ala or Val
  Variant (13)..(13): Xaa in position 13 is any amino acid
  Variant (15)..(15): Xaa in position 15 is any amino acid
  Variant (25)..(25): Xaa in position 25 is any amino acid
  Variant (26)..(26): Xaa in position 26 is Ser or Thr
  Variant (27)..(28): Xaa in position 27 to 28 is any amino acid
  Variant (30)..(30): Xaa in position 30 is Thr or Val
  Variant (31)..(31): Xaa in position 31 is any amino acid
  Variant (32)..(32): Xaa in position 32 is Asn or Arg
  Variant (33)..(33): Xaa in position 33 is any amino acid
  Variant (34)..(34): Xaa in position 34 is Glu or Ser
  Variant (35)..(35): Xaa in position 35 is Ala, Asn or Thr
  Variant (39)..(40): Xaa in position 39 to 40 is any amino acid
  Variant (43)..(43): Xaa in position 43 is Ala, Ser or Val
  Variant (44)..(44): Xaa in position 44 is Glu or Gln
  Variant (45)..(45): Xaa in position 45 is Ala or Val
  Variant (51)..(51): Xaa in position 51 is Ala or Thr
  Variant (52)..(54): Xaa in position 52 to 54 is any amino acid
  Variant (56)..(56): Xaa in position 56 is Ala, Pro or Val
SXGGIPLANGDXXLXKPPPWAYPLXXXXEXXXXXXDRMXXSTXXXIDQAMXXXXEXK

SEQ ID NO: 1583 - protein, 58 aa, Artificial sequence
  protein pattern
  Variant (4)..(5): Xaa in position 4 to 5 is any amino acid
  Variant (6)..(6): Xaa in position 6 is Ile, Leu or Val
  Variant (7)..(7): Xaa in position 7 is Ala or Ser
  Variant (8)..(8): Xaa in position 8 is Glu, Gln or Ser
  Variant (9)..(9): Xaa in position 9 is Ala, Thr or Val
  Variant (10)..(10): Xaa in position 10 is Glu or Gln
  Variant (11)..(11): Xaa in position 11 is any amino acid
  Variant (12)..(12): Xaa in position 12 is Asn or Thr
  Variant (15)..(15): Xaa in position 15 is Ile or Val
  Variant (19)..(19): Xaa in position 19 is Leu or Met
  Variant (21)..(21): Xaa in position 21 is Lys or Arg
  Variant (23)..(23): Xaa in position 23 is Ile, Met or Val
  Variant (24)..(24): Xaa in position 24 is Phe or Tyr
  Variant (27)..(27): Xaa in position 27 is Leu or Val
  Variant (28)..(28): Xaa in position 28 is any amino acid
  Variant (34)..(34): Xaa in position 34 is any amino acid
  Variant (35)..(35): Xaa in position 35 is Ile or Val
  Variant (43)..(43): Xaa in position 43 is Ala or Val
  Variant (46)..(46): Xaa in position 46 is Leu or Met
  Variant (48)..(48): Xaa in position 48 is Cys or Ser
  Variant (53)..(53): Xaa in position 53 is Lys or Arg
  Variant (54)..(54): Xaa in position 54 is Ala or Cys
  Variant (56)..(56): Xaa in position 56 is any amino acid
  Variant (58)..(58): Xaa in position 58 is Cys or Ser
EINXXXXXXXXXGGXCFPXGXGXXRVXXIPEDEXXLLNSREKXPYXIXVEVLXXEXPX

SEQ ID NO: 1584 - protein, 61 aa, Artificial sequence
  protein pattern
  Variant (2)..(2): Xaa in position 2 is Lys or Arg
  Variant (3)..(3): Xaa in position 3 is Leu or Val
  Variant (4)..(4): Xaa in position 4 is Thr or Val
  Variant (5)..(5): Xaa in position 5 is Leu or Val
  Variant (6)..(6): Xaa in position 6 is Ser or Thr
  Variant (8)..(8): Xaa in position 8 is Asp or Val
  Variant (11)..(11): Xaa in position 11 is Leu or Val
  Variant (12)..(12): Xaa in position 12 is Asn or Arg
  Variant (13)..(13): Xaa in position 13 is Leu or Met
  Variant (14)..(14): Xaa in position 14 is Asp or Glu
  Variant (15)..(15): Xaa in position 15 is Asp or Ser
  Variant (16)..(16): Xaa in position 16 is Ile or Val
  Variant (17)..(17): Xaa in position 17 is Asp, Glu, Pro or Thr
  Variant (19)..(20): Xaa in position 19 to 20 is any or no amino acid
  Variant (22)..(22): Xaa in position 22 is any amino acid
  Variant (23)..(24): Xaa in position 23 to 24 is any or no amino acid
  Variant (26)..(26): Xaa in position 26 is Lys or Arg
  Variant (28)..(28): Xaa in position 28 is Asp or Glu
  Variant (33)..(33): Xaa in position 33 is Pro or Ser
  Variant (35)..(35): Xaa in position 35 is any amino acid
  Variant (36)..(36): Xaa in position 36 is Ile or Val
  Variant (38)..(38): Xaa in position 38 is any amino acid
  Variant (42)..(42): Xaa in position 42 is Lys or Arg
  Variant (46)..(46): Xaa in position 46 is Ala or Leu
  Variant (52)..(52): Xaa in position 52 is Leu or Pro
  Variant (59)..(59): Xaa in position 59 is Ala or Val
VXXXXXAXPGXXXXXXXDXXPXXXRXKXHRRVXSXXAXEEVXAAAXKGEAPXGLPLKGXGQ

SEQ ID NO: 1585 - protein, 29 aa, Artificial sequence
  protein pattern
  Variant (3)..(3): Xaa in position 3 is any amino acid
  Variant (4)..(4): Xaa in position 4 is Asp or Glu
  Variant (7)..(7): Xaa in position 7 is Asp or Ser
  Variant (9)..(9): Xaa in position 9 is Ile or Val
  Variant (12)..(12): Xaa in position 12 is any amino acid
  Variant (15)..(15): Xaa in position 15 is Ala or Ile
  Variant (19)..(19): Xaa in position 19 is Leu or Val
  Variant (20)..(20): Xaa in position 20 is any amino acid
  Variant (24)..(24): Xaa in position 24 is Pro or Ser
  Variant (27)..(27): Xaa in position 27 is Ile, Met or Val
DDXXGIXRXQEXCQXAATXXGEWXPLXRP

SEQ ID NO: 1586 - protein, 42 aa, Artificial sequence
  protein pattern
  Variant (4)..(4): Xaa in position 4 is any or no amino acid
  Variant (6)..(9): Xaa in position 6 to 9 is any amino acid
  Variant (10)..(11): Xaa in position 10 to 11 is any or no amino acid
  Variant (15)..(15): Xaa in position 15 is Ala, Cys or Ser
  Variant (17)..(17): Xaa in position 17 is His or Tyr
  Variant (18)..(18): Xaa in position 18 is Ala, Asp or Glu
  Variant (22)..(22): Xaa in position 22 is Phe or Leu
  Variant (24)..(24): Xaa in position 24 is any amino acid
  Variant (25)..(25): Xaa in position 25 is Ala or Ser
  Variant (28)..(28): Xaa in position 28 is Asp or Glu
  Variant (32)..(32): Xaa in position 32 is Asp or Gly
  Variant (36)..(36): Xaa in position 36 is Ile or Val
  Variant (39)..(39): Xaa in position 39 is any amino acid
PLPXNXXXXXXRKGXYXXSLEXVXXLCXTSYXLVDXFPXEDR

SEQ ID NO: 1587 - protein, 38 aa, Artificial sequence
  protein pattern
  Variant (4)..(4): Xaa in position 4 is Ala or Ser
  Variant (7)..(7): Xaa in position 7 is Phe, Ile or Leu
  Variant (9)..(9): Xaa in position 9 is Ala or Glu
  Variant (10)..(10): Xaa in position 10 is Ala, Gly or Val
  Variant (12)..(13): Xaa in position 12 to 13 is any or no amino acid
  Variant (15)..(15): Xaa in position 15 is Ile, Leu or Val
  Variant (17)..(17): Xaa in position 17 is Lys or Arg
  Variant (18)..(18): Xaa in position 18 is Ala, Asp or Ser
  Variant (20)..(20): Xaa in position 20 is Ile or Val
  Variant (21)..(21): Xaa in position 21 is His or Tyr
  Variant (23)..(23): Xaa in position 23 is any amino acid
  Variant (32)..(32): Xaa in position 32 is Ile or Val
DALXGEXWXXKXXRXRXXSXXGXLPGWDLRSXIVKSGD

SEQ ID NO: 1588 - protein, 27 aa, Artificial sequence
  protein pattern
  Variant (3)..(3): Xaa in position 3 is Lys or Arg
  Variant (8)..(8): Xaa in position 8 is any amino acid
  Variant (10)..(10): Xaa in position 10 is Ala, Gly or Ser
  Variant (14)..(14): Xaa in position 14 is Lys or Arg
  Variant (19)..(19): Xaa in position 19 is Ala or Val
  Variant (20)..(20): Xaa in position 20 is any amino acid
  Variant (22)..(22): Xaa in position 22 is Phe or Leu
  Variant (24)..(24): Xaa in position 24 is any amino acid
LDXFVIDXCXKSLXIALKXXWXLXAEL

SEQ ID NO: 1589 - protein, 33 aa, Artificial sequence
  protein pattern
  Variant (2)..(13): Xaa in position 2 to 13 is any amino acid
  Variant (14)..(14): Xaa in position 14 is any or no amino acid
  Variant (16)..(16): Xaa in position 16 is any or no amino acid
  Variant (19)..(19): Xaa in position 19 is Ile or Leu
  Variant (20)..(20): Xaa in position 20 is Phe or Leu
  Variant (22)..(22): Xaa in position 22 is Lys or Arg
  Variant (23)..(23): Xaa in position 23 is Phe or Leu
  Variant (24)..(24): Xaa in position 24 is any amino acid
  Variant (25)..(25): Xaa in position 25 is Ile or Pro
  Variant (26)..(26): Xaa in position 26 is Gly or Ser
  Variant (33)..(33): Xaa in position 33 is Ala or Leu
GXXXXXXXXXXXXXDXNKXXKXXXXXPKVRDAX

SEQ ID NO: 1590 - protein, 38 aa, Artificial sequence
  protein pattern
  Variant (2)..(2): Xaa in position 2 is Phe, Ile or Leu
  Variant (3)..(3): Xaa in position 3 is any amino acid
  Variant (4)..(4): Xaa in position 4 is Glu or Gln
  Variant (5)..(5): Xaa in position 5 is Gly or Ser
  Variant (9)..(9): Xaa in position 9 is Ser or Thr
  Variant (11)..(11): Xaa in position 11 is Asn or Ser
  Variant (14)..(14): Xaa in position 14 is any or no amino acid
  Variant (16)..(16): Xaa in position 16 is any or no amino acid
  Variant (19)..(19): Xaa in position 19 is Lys or Arg
  Variant (23)..(23): Xaa in position 23 is Gln or Arg
  Variant (25)..(25): Xaa in position 25 is Ile, Leu or Val
  Variant (31)..(31): Xaa in position 31 is Phe or Leu
  Variant (35)..(36): Xaa in position 35 to 36 is any amino acid
GXXXXSPGXEXFFXRXLFXDRDXSXEDSELXGSKXXKE

SEQ ID NO: 1591 - protein, 53 aa, Artificial sequence
  protein pattern
  Variant (3)..(3): Xaa in position 3 is Cys, Gly or Ser
  Variant (4)..(4): Xaa in position 4 is Asp or Glu
  Variant (5)..(5): Xaa in position 5 is Lys or Arg
  Variant (6)..(6): Xaa in position 6 is Asp or Glu
  Variant (9)..(9): Xaa in position 9 is Phe or Leu
  Variant (10)..(10): Xaa in position 10 is any amino acid
  Variant (12)..(12): Xaa in position 12 is any or no amino acid
  Variant (14)..(14): Xaa in position 14 is any or no amino acid
  Variant (16)..(16): Xaa in position 16 is Asp or Glu
  Variant (18)..(18): Xaa in position 18 is Lys or Arg
  Variant (19)..(19): Xaa in position 19 is Asp, Gly or Ser
  Variant (21)..(21): Xaa in position 21 is any or no amino acid
  Variant (23)..(23): Xaa in position 23 is any amino acid
  Variant (24)..(24): Xaa in position 24 is Asp, Glu, Pro or Gln
  Variant (25)..(25): Xaa in position 25 is any amino acid
  Variant (26)..(26): Xaa in position 26 is Pro, Ser or Thr
  Variant (27)..(27): Xaa in position 27 is Asn, Pro or Ser
  Variant (29)..(29): Xaa in position 29 is Glu or Ser
  Variant (30)..(30): Xaa in position 30 is Glu or Gly
  Variant (31)..(31): Xaa in position 31 is any amino acid
  Variant (32)..(32): Xaa in position 32 is Phe or Leu
  Variant (33)..(33): Xaa in position 33 is any amino acid
  Variant (34)..(34): Xaa in position 34 is Lys or Arg
  Variant (35)..(35): Xaa in position 35 is any amino acid
  Variant (37)..(37): Xaa in position 37 is any amino acid
  Variant (38)..(38): Xaa in position 38 is Asp or Arg
  Variant (39)..(39): Xaa in position 39 is Asp or Asn
  Variant (40)..(41): Xaa in position 40 to 41 is any amino acid
  Variant (42)..(42): Xaa in position 42 is Asp, Glu or Asn
  Variant (43)..(43): Xaa in position 43 is Asp, Glu or Arg
  Variant (44)..(44): Xaa in position 44 is Glu, Gln or Ser
  Variant (45)..(45): Xaa in position 45 is Asp, Glu or Gly
  Variant (46)..(47): Xaa in position 46 to 47 is any amino acid
  Variant (48)..(48): Xaa in position 48 is Glu, Asn or Thr
  Variant (49)..(49): Xaa in position 49 is Asp, Glu, Asn or Ser
  Variant (50)..(50): Xaa in position 50 is any amino acid
  Variant (51)..(51): Xaa in position 51 is Glu or Lys
  Variant (52)..(52): Xaa in position 52 is Gly or Thr
  Variant (53)..(53): Xaa in position 53 is Phe or Val
EEXXXXGFXXRXLXRXSXXEXDXXXXXSXXXXXXXLXXXXXXXXXXXXXXXXX

SEQ ID NO: 1592 - protein, 26 aa, Artificial sequence
  protein pattern
  Variant (2)..(2): Xaa in position 2 is Ile or Val
  Variant (3)..(3): Xaa in position 3 is Glu or Ser
  Variant (4)..(4): Xaa in position 4 is Ser or Val
  Variant (5)..(5): Xaa in position 5 is any amino acid
  Variant (6)..(6): Xaa in position 6 is Leu or Met
  Variant (7)..(7): Xaa in position 7 is Asp or Gly
  Variant (10)..(12): Xaa in position 10 to 12 is any or no amino acid
  Variant (14)..(14): Xaa in position 14 is any or no amino acid
  Variant (16)..(16): Xaa in position 16 is Gly or Gln
  Variant (17)..(17): Xaa in position 17 is Trp or Tyr
  Variant (18)..(18): Xaa in position 18 is Asp or Ser
  Variant (19)..(19): Xaa in position 19 is His or Tyr
  Variant (20)..(20): Xaa in position 20 is any amino acid
  Variant (21)..(21): Xaa in position 21 is Gln or Ser
  Variant (23)..(23): Xaa in position 23 is any amino acid
  Variant (24)..(24): Xaa in position 24 is Leu or Val
  Variant (25)..(25): Xaa in position 25 is any amino acid
  Variant (26)..(26): Xaa in position 26 is Ala or Gly
LXXXXXXAWXXXRXRXXXXXXRXXXX

SEQ ID NO: 1593 - DNA, 933 bp, Arabidopsis thaliana
  CDS (1)..(933)
atgagactcgtcgtctcaagctgtctactagttgcagctccttttctctcctctctgttacgagtctcactcgccactgttgtcctcaattccatctccgcctcttttgccgatctcccagccaaatttgacggctccgtgaccaaaaacggaatctgtggagctctatacgtcgcagatcctctcgacggttgctcaccgcttctccacgccgccgcatccaactggacgcaacacagaactactaagttcgctttgataatcagaggcgaatgttcttttgaggataagctgctcaatgcccagaactcaggttttcaagctgtgattgtctatgacaacattgacaacgaagatctcatcgtcatgaaggtgaaccctcaggacattacagttgatgcagtcttcgtttcaaatgtcgccggtgagattttgagaaagtacgcgagaggccgagatggtgaatgctgccttaatccgccagacagagggagcgcttggactgtgttggccatctccttcttctctctccttcttatagtcactttcctgttgattgccttctttgcacccagacactggacccaatggcgagggaggcacaccaggaccatcaggttagatgcaaagctcgtccacacactcccctgcttcaccttcactgattctgctcaccacaaggccggggaaacatgtgctatatgtctcgaggattacagatttggagaaagcctcagacttctcccctgccaacatgcttttcacttgaattgcatcgactcttggttgacaaaatggggtacatcttgccctgtgtgcaagcatgacataagaaccgagactatgtcttctgaggtacataaacgagagagtccgagaacagatacaagtacgagtagatttgcctttgcccaatccagtcaaagccgttag

SEQ ID NO: 1594 - protein, 310 aa, Arabidopsis thaliana
MRLVVSSCLLVAAPFLSSLLRVSLATVVLNSISASFADLPAKFDGSVTKNGICGALYVADPLDGCSPLLHAAASNWTQHRTTKFALIIRGECSFEDKLLNAQNSGFQAVIVYDNIDNEDLIVMKVNPQDITVDAVFVSNVAGEILRKYARGRDGECCLNPPDRGSAWTVLAISFFSLLLIVTFLLIAFFAPRHWTQWRGRHTRTIRLDAKLVHTLPCFTFTDSAHHKAGETCAICLEDYRFGESLRLLPCQHAFHLNCIDSWLTKWGTSCPVCKHDIRTETMSSEVHKRESPRTDTSTSRFAFAQSSQSR

SEQ ID NO: 1595 - DNA, 1955 bp, zea mays
  CDS (103)..(1725)
cgaatcgcgctgcgtcccctcctccccgcctgcttcatcatggaagccgacgtccccattgccgctgctacccccaggtacggagcaagcctaagccaatagctgcacccggagacacagatttggagtattgagctggctctctgttttgtcggttgtgtgcttctacttcatagaaaagagctgcattttcttcttagtgctttggatgctggccagatgaagagtagtagatttctgttcctttgtgcaatgttctgtcttatggctcggctgggagctgccaatgtcgtgctaatggggaataatctgaccctgtccttcgatgacattgaggcgagcttttctccaggagtgaaagggtctggagtcagtggagtagtttatgcttctgaacctttgaatgcctgcagcccattaacaatcaaaacagtcaatggccctccatctccctttgcgttaattataagaggcgggtgcacatttgatgagaaagtaaaaaatgcacaggatgctggattcaaagctgcaatcgtatacgacaataaaaatagtggggtcctggtttcaatggctggaagctcaagtggcattcatatatatgccgtgttcgtttcaaaggcctcgggagaggtgttgaagaaattctcaggcaatatggatgtagaggtgtggatactacctacttttgagaactcagcctggtcgatcatggcaatctcattcgtatcgctacttgccatgtgtgctgtactgggtacgtgtttctttgtgagaaggcatcgaataaggagggagcaccctagaatcgcagaagatcgagaattccatggaatgagcagtcagttagttaaggctattccaagtcttatttttacaaaagtgcaagaagataactgcacatcttcaatgtgtgccatttgcttggcagactacaatgtcggagaaaagctaagagtgctgccttgccgtcacaagtttcatgcagcttgtgtggacttgtggctgacttcttggcgaacattctgtcctatatgcaagagagatgcaaggagtggagcatcagaagttgttgcgacagaggctacccccttgctttcttctgctgctcggttaccttcattccggtcgagtgtggcagcatcccctccaaggccaataagccggcatccttcatcgcactcggtttctcgtgcttactctgtttctagtacccccaattctcccaacccctttatatcttctcacataagctcacctggcatccgtgcaagcagaagcatcacagaccttggaaatatatcatctctccatcctcgcatctcacatttgtcatcgacgcactccctggttggcagccacttgtctccaccaatcagtataaggtattggtcgtcccatgtggcgcattcagggtatggatcacccagtccacacgtgagttcatcctacatctccaattctgggtatggttcttcaagctactgctatctgggactgggaggctccagccacagccagcatgggacatacctaaggcgctgtggagaatcggggccaagcctgtgtaccatggtgccgcagcagttgcagtgggagactaatgtagcagcaggtgcgtcgtcagcaaagtccctgcggcagtcctcctacctgagacactgtggcgattcagacgccagtttgtctgacatgacgtcagcccagtcgttgccgaggtgctgagggggctctggatttgtgatttgtgcattacacagtgaggagtgtgtgacataacattactacattggctgtggtgtggagagaaacatgcatagcaatagaacatacacatagtagcacatagtagggttttgttctcttgtttctgagatgagatgtgttcttgtgctcgcgatgcgtacatatggcaagtaacatgcatgagggaataatatttatttggttgtcgt

SEQ ID NO: 1596 - protein, 540 aa, zea mays
LHPETQIWSIELALCFVGCVLLLHRKELHFLLSALDAGQMKSSRFLFLCAMFCLMARLGAANVVLMGNNLTLSFDDIEASFSPGVKGSGVSGVVYASEPLNACSPLTIKTVNGPPSPFALIIRGGCTFDEKVKNAQDAGFKAAIVYDNKNSGVLVSMAGSSSGIHIYAVFVSKASGEVLKKFSGNMDVEVWILPTFENSAWSIMAISFVSLLAMCAVLGTCFFVRRHRIRREHPRIAEDREFHGMSSQLVKAIPSLIFTKVQEDNCTSSMCAICLADYNVGEKLRVLPCRHKFHAACVDLWLTSWRTFCPICKRDARSGASEVVATEATPLLSSAARLPSFRSSVAASPPRPISRHPSSHSVSRAYSVSSTPNSPNPFISSHISSPGIRASRSITDLGNISSLHPRISHLSSTHSLVGSHLSPPISIRYWSSHVAHSGYGSPSPHVSSSYISNSGYGSSSYCYLGLGGSSHSQHGTYLRRCGESGPSLCTMVPQQLQWETNVAAGASSAKSLRQSSYLRHCGDSDASLSDMTSAQSLPRC

SEQ ID NO: 1597 - DNA, 2631 bp, Glycine max
  CDS (425)..(1957)
  misc_feature (2618)..(2618): n is a, g, c or t
  misc_feature (2619)..(2619): n is a, g, c or t
  misc_feature (2620)..(2620): n is a, g, c or t
  misc_feature (2621)..(2621): n is a, g, c or t
  misc_feature (2622)..(2622): n is a, g, c or t
  misc_feature (2623)..(2623): n is a, g, c or t
  misc_feature (2625)..(2625): n is a, g, c or t
  misc_feature (2628)..(2628): n is a, g, c or t
  misc_feature (2629)..(2629): n is a, g, c or t
  misc_feature (2630)..(2630): n is a, g, c or t
gtaaaatctcgccgccttcacataaaaataatctttaatgaaagaatttcatatcaggtgaaattaatttatgatctttgaggtagacccgtattatctgacctatgaaaaaatccctgcttatccacgcacgatttggaacttctgaaaacacgctgaaatagatttttttttttgggtataatattgattgtagtagtatttattttatcttctgatattatatttccaattttgctgtcaaaacattattagcgatcaatttgaaattgatacagagctgagagcatcaaggaatcgaagaatagaagattcatttttttttctttttgatatggaagctgatgtttctattatttttgttgcgttttcaaaaccctaaattggagaaatcccaatttctccttctgtctttctgctttggatgtttttcaaccaaaaaattgtgcttttcaaatcttttgctctgatgggtacttcaaatcttctcttgtttttctctctgatgagcctgtgtgctatggcggcttccaaggtggtgcttattgggaataatatcactctctcctttgatgatattgaagctaattttgccccagcagtcaaaggttctggaaaatatggggtcttatatttggcagaaccactggatgcgtgtgcagaattgacaaataaagttgaacaacttcccaatgcgagttcaccttttgctttggtggttagagggggatgtagctttgaggaaaaagtcggattagcacaaaaggctggcttcaaagctgtaattgtctatgacaatgaagagggtggcatcttggttgcgatggcaggaaattctgctggtataagaatacacgctgtatttgtatctaaagcttcgggtgaaatactaaagaaatatgctgggttgactaatgtggaaatatggctcattccaacttttgaaaactcagcatggtctatcatggcaatttcatttatttccctgctagctatgtctgctgtcctggccacttgtttcttcgtccgcaagcatcgcataagaagagaaaggcctcgagcttctcttgttcgtgaatttcatggtatgagtagtcgcctagtgaaagcaatgccgagtttggtatttacttctgttttggaagataactgtacatcaagaacatgtgctatatgccttgaagactattgtgttggtgagaagctcaggattctgccctgctgtcacaagtttcatgctgcctgtgtggattcgtggcttacttcatggagaaccttttgtccagtttgcaagcgtgatgctagaaccggcttaactgatccaccaccttcagagtccacacccttgctctcatcaaccccagcatctatggcatcctctgtcttatcttctgcaagatcatcactagcttcatcttcagcaatacaaattgcccggacagcatctatggcatcctctgccttaccttctgcgagatcatctctagcttcatcttcagcaatacaaattgcccggacagcatctatggcatcctctgccttacattctgcgagatcatcactagcttcatcttcagcaatacaaatttcccgggcagcttcacagaccccatctgtttcccgtaaccactccatagccagtacaccttatgttcagccatctcttaggtcctcctaccatcaatccccctccctaagcatcagccgaagctccgtagatcttaggaatgcatcccaaagatctctagcttctcacttgaattcaccatgttccatgggatacccatctttgtcatctcttaactcaaggtacatgtctccacacattccaagtccaagcaatgcttcagtaagctatatgggttcatccagtcatcaacaacatcctctccgttatagtgagtcggctgcaagcttctccccatttgcatcgacacactcccttccagaatgttaaattgttcaattgattatatcatatgattgagacgtccacgcagttgaactagtaattgccaagtcttgaactaaaaggtggccatgtgatgaccggtggtctagttgaatagtcctatgtgatgcttggggcattccctacctctgtcatttgacttccgtcttggcacctggtgtacattgtagcttctctctggtgttagtttcgtttacatgtgctggttgaggttcttacatttataggttggagagcttgcatacagtaacttgtgcgtattgtttgtactttgaatgttgacgttttcatggccttgatgtccaagtatagtcaactgctaacaagagaaatgttgggctgtattgacactagacacattgaagtaagaagagttctttatgctctgtctagtggatttgtccaactgaatcatgagagatcatgtgatgtatcactctagtgttatctatacttgatcatctaattgcaactctgagtatcaataatacttgtaaaattttcgtaaaaaaaatagctaatagataatgctggtaagtgttatcaattttaaaccatgggggcaaattagatatcctatttgatccgtggaaaattcatcatctagatatgttaaataccttctgtggcatcttcgatttatagnnnnnngnatnnnt

SEQ ID NO: 1598 - protein, 510 aa, Glycine max
MFFNQKIVLFKSFALMGTSNLLLFFSLMSLCAMAASKVVLIGNNITLSFDDIEANFAPAVKGSGKYGVLYLAEPLDACAELTNKVEQLPNASSPFALVVRGGCSFEEKVGLAQKAGFKAVIVYDNEEGGILVAMAGNSAGIRIHAVFVSKASGEILKKYAGLTNVEIWLIPTFENSAWSIMAISFISLLAMSAVLATCFFVRKHRIRRERPRASLVREFHGMSSRLVKAMPSLVFTSVLEDNCTSRTCAICLEDYCVGEKLRILPCCHKFHAACVDSWLTSWRTFCPVCKRDARTGLTDPPPSESTPLLSSTPASMASSVLSSARSSLASSSAIQIARTASMASSALPSARSSLASSSAIQIARTASMASSALHSARSSLASSSAIQISRAASQTPSVSRNHSIASTPYVQPSLRSSYHQSPSLSISRSSVDLRNASQRSLASHLNSPCSMGYPSLSSLNSRYMSPHIPSPSNASVSYMGSSSHQQHPLRYSESAASFSPFASTHSLPEC

SEQ ID NO: 1599 - DNA, 1381 bp, Zea mays
  CDS (69)..(899)
aaaaaacctctaccttctatgagccaagtaaagagagaagccgataaactgtgtttcacgtcccggcgatgagcccccgtgtggtcctcctcttcctcgccgccctccgcccctgcgccgccctcgtccgccttcactccaccactttttccttcactttccttgacgccccagcgcgctttggcccccgagtgagcggcgatgggatctgcggctccctgcgtgccgctgacccggccgaggcgtgtgagaccatcaaagaccgcggcggccgccgcggcgcgggcaggaaggctttcgtgctgatcgcgaggggcaactgcagctttgaggagaaggtgcgggcggcgcagcaagcggggttcgacgcctccatcgtgtacgacgatgaggagaaggccagcctttactccatggttggtgaatctgatggcatacacatacctgcgatatttgtttccaagatggctggtgaaacactaaagaagtttgccaggggtgaagatgaagagtgctgtattaactcgtcgatggatgagactgcagggacagtgttggtaatgtcatttgtgtcacttgttgtcatcatgtcagttcttgcttcttttctatttgctcgaaactgccgacttctacgccatggagttgataatcacccaccttacgtcaagaaacaagtggtggaaaagtttccctgctcagcgtacagtgctccctgttctagtgaagataatttccaggaagcttgtgcaatttgcttagaagactacaataatggtgatatgcttagacatctcccatgcaagcatgaatttcacaagatctgtattgattcttggctcacaaaatggggcatcttctgccctatatgcaagctagaagtaacattgggcgggtaggcacacttcattactgcatccaagtgctggcagttctattgaagattgttgatcttttgatccattgcgaggttcaatattcattttaatgattgatctttgagaatgaagtacagatctcagttcctcaggttgggccttgtagtgtgctactagactactgcgttcaggttaatatttcgatcatctgtttgatatccttgtttggtgtgtggaagagctcaaggagctctgctgctgataaatgtcagcacttctgttgcagtgtattgccctgtattcctagagaaattaggtgttgtgtgcaagcaaagtgtaatcgtaagtccaatgtaaaccccttttataccaggttacgttaccttgctcattttattttgtgggcacagataaatgctcgttaattaggcaggggttgatcttactctaaaaaattgtcctaaggctcagaaataacgatgtttgaagatgcatttgttgcg

SEQ ID NO: 1600 - protein, 276 aa, Zea mays
MSPRVVLLFLAALRPCAALVRLHSTTFSFTFLDAPARFGPRVSGDGICGSLRAADPAEACETIKDRGGRRGAGRKAFVLIARGNCSFEEKVRAAQQAGFDASIVYDDEEKASLYSMVGESDGIHIPAIFVSKMAGETLKKFARGEDEECCINSSMDETAGTVLVMSFVSLVVIMSVLASFLFARNCRLLRHGVDNHPPYVKKQVVEKFPCSAYSAPCSSEDNFQEACAICLEDYNNGDMLRHLPCKHEFHKICIDSWLTKWGIFCPICKLEVTLGG

SEQ ID NO: 1601 - DNA, 1798 bp, Zea mays
  CDS (142)..(1512)
ccgcccgctaattcctcctagttctagtcccctctctcctgcgccgactcatctttttcctcgtgtcactcccctgctgctgctgctgccgggaagatcaaatcccgtcaaaaggctccaaaggatcagagttctgtcaagatggcatgcccaagagctccagcagtggaaggttcaggtgtaagtggcgttctttatgctgtggaacctaaggatgcatgcagtccattgagagcgaaagcgattcaaggctctgtctcaccttttgcgttgattataagaggcggttgccaatttgatgacaaaattagaaatgcacagaatgctggattcaaggctgctgtagtatataataatgaagataatgacatccttgtttcaatggctggaagctcgcttggtgtccagatatatgcagtgttcatctctaaggcatcaggggaggagctgaagaaatattcaggccaaactgatgcagagttatggataataccaacatatgagaactcagcttggccaatcatggcaatttcattcgtatcactgcttgctatgtctgctatcctagttgcatgtttctttgcgaggagacaccagatcagacgggacagggcaagacttccccgagctcaggagtcccatggaatgagcagtcaattagttaaggcaataccaagccttattttcacaaaagtgcaagaagacaactgtacatcagcaacatgcgccatttgcttggaagactacagtgttggagaaaagataagagtgctaccttgtcgacacaagttccatgcggcttgtgtggacctatggctcacctcatggagaacattctgccctgtatgcaagcgggacgcaagtgctggaacgtcagacccccctgtatcagagtctacccctttgctttcatcatccgccacacgcttgccggaatcaactgtgttggcttccttgcggtctacagcagcagcgtctccccccaggacgatcagccggcatcctttgttgcggtcaatatcccgcaattactctgtttcaggttccagtatccttcgcacccccgactctaggtttgatgcaaactcatctatctgcacaagtggaagcaacttggaccttgcaaatgtaccatccccatggtctggcacttggcaccgtgcgtctgctcactctttgtgcaggggctacttgtccccaccgatcggcatcaggaatacctcagcacatgtctcgcgttctgccaatggatctcccagtcgttacgtaggctcatcacgcatgtcccatggatcttcagggcagcagcatcctcacctgaggcactgcacattgtcaggcccgagcctgttcaccatggtgccccagtcaccgcaacagaaccagttgcagcatggtggatactcggaaacaaatctgtcggctgccgcatcggctcaatcattccgtcagctctacctgcagcattgccctgattctgacacgtcgtctcagtcacttccagggtgctgatctcttgctgcaatattcactgattcttgcgcccatgagaaatcttgcctggtgctgaattgacatgtggattttgagctcgtcagcatagttcaccatgatgataaaaaaaagagaaagaagtttggagtagttttacatgtggaaacaaaactgcttgtaagaagagagaatgtgcagccccagagtgtgagcaattttacatgcttgagtgtacaggggtttggagtagtcttggacttgcttattttgaggcatgtattgcagtcataggttacttctgctc

SEQ ID NO: 1602 - protein, 456 aa, Zea mays
MACPRAPAVEGSGVSGVLYAVEPKDACSPLRAKAIQGSVSPFALIIRGGCQFDDKIRNAQNAGFKAAVVYNNEDNDILVSMAGSSLGVQIYAVFISKASGEELKKYSGQTDAELWIIPTYENSAWPIMAISFVSLLAMSAILVACFFARRHQIRRDRARLPRAQESHGMSSQLVKAIPSLIFTKVQEDNCTSATCAICLEDYSVGEKIRVLPCRHKFHAACVDLWLTSWRTFCPVCKRDASAGTSDPPVSESTPLLSSSATRLPESTVLASLRSTAAASPPRTISRHPLLRSISRNYSVSGSSILRTPDSRFDANSSICTSGSNLDLANVPSPWSGTWHRASAHSLCRGYLSPPIGIRNTSAHVSRSANGSPSRYVGSSRMSHGSSGQQHPHLRHCTLSGPSLFTMVPQSPQQNQLQHGGYSETNLSAAASAQSFRQLYLQHCPDSDTSSQSLPGC

SEQ ID NO: 1603 - DNA, 2295 bp, Zea mays
  CDS (429)..(1925)
gatgtgggatagtggaccggatgacaaagcaagagcagaaaaaagaactttcaccatcctccctatcaatacaagattcatctacacaaattataatatactccgtgcgaaggaaagatcaaattagagattcattcgatcaattctgattgtttccttccattccaaaccaccttcaattctgatttctgcgggtgtgggatatcgtccccccttgccattccaaatcctcctctgcaattttctcatggcagctgacgtttccatcccaactcgatccgcgtcaaccgcccgctaattcctcctagttctagtcccctctctcctgcgccgactcatctttttcctcgtgtcactcccctgctgctgctgctgccgggaagatcaaatcccgtcaaaaggctccaaaggatcagagttctgtcaagatggcatgcccaagaggaaggacaccatttcccctttgtttctttctgatgatttgcctcatggctcagctgggagcttccaatgttgtactcatggcgaacaacactaccttgtcgttggatgatgtcgaggcaacttttactccagcagtggaaggttcaggtgtaagtggcgttctttatgctgtggaacctaaggatgcatgcagtccattgagagcgaaagcgattcaaggctctgtctcaccttttgcgttgattataagaggcggttgccaatttgatgacaaaattagaaatgcacagaatgctggattcaaggctgctgtagtatataataatgaagataatgacatccttgtttcaatggctggaagctcgcttggtgtccagatatatgcagtgttcatctctaaggcatcaggggaggagctgaagaaatattcaggccaaactgatgcagagttatggataataccaacatatgagaactcagcttggccaatcatggcaatttcattcgtatcactgcttgctatgtctgctatcctagttgcatgtttctttgcgaggagacaccagatcagacgggacagggcaagacttccccgagctcaggagtcccatggaatgagcagtcaattagttaaggcaataccaagccttattttcacaaaagtgcaagaagacaactgtacatcagcaacatgcgccatttgcttggaagactacagtgttggaggcacgagaagagtgctaccttgtcgacacaagttccatgcggcttgtgtggacctatggctcacctcatggagaacattctgccctgtatgcaagcgggacgcaagtgctggaacgtcagacccccctgtatcagagtctacccctttgctttcatcatccgccacacgcttgccggaatcaactgtgttggcttccttgcggtctacagcagcagcgtctccccccaggacgatcagccggcatcctttgttgcggtcaatatcccgcaattactctgtttcaggttccagtatccttcgcacccccgactctaggtttgatgcaaactcatctatctgcacaagtggaagcaacttggaccttgcaaatgtaccatccccatggtctggcacttggcaccgtgcgtctgctcactctttgtgcaggggctacttgtccccaccgatcggcatcaggaatacctcagcacatgtctcgcgttctgccaatggatctcccagtcgttacgtaggctcatcacgcatgtcccatggatcttcagggcagcagcatcctcacctgaggcactgcacattgtcaggcccgagcctgttcaccatggtgccccagtcaccgcaacagaaccagttgcagcatggtggatactcggaaacaaatctgtcggctgccgcatcggctcaatcattccgtcagctctacctgcagcattgccctgattctgacacgtcgtctcagtcacttccagggtgctgatctcttgctgcaatattcactgattcttgcgcccatgagaaatcttgcctggtgctgaattgacatgtggattttgagctcgtcagcatagttcaccatgatgataaaaaaaagagaaagaagtttggagtagttttacatgtggaaacaaaactgcttgtaagaagagagaatgtgcagccccagagtgtgagcaattttacatgcttgagtgtacaggggtttggagtagtcttggacttgcttattttgaggcatgtattgcagtcataggttacttctgctcaatagtttatgtgttgcctctgaaaaattaaacaagcgaaaaacttttaccgatatacagctttgtaggaatcctagttgctgt

SEQ ID NO: 1604 - protein, 498 aa, Zea mays
MACPRGRTPFPLCFFLMICLMAQLGASNVVLMANNTTLSLDDVEATFTPAVEGSGVSGVLYAVEPKDACSPLRAKAIQGSVSPFALIIRGGCQFDDKIRNAQNAGFKAAVVYNNEDNDILVSMAGSSLGVQIYAVFISKASGEELKKYSGQTDAELWIIPTYENSAWPIMAISFVSLLAMSAILVACFFARRHQIRRDRARLPRAQESHGMSSQLVKAIPSLIFTKVQEDNCTSATCAICLEDYSVGGTRRVLPCRHKFHAACVDLWLTSWRTFCPVCKRDASAGTSDPPVSESTPLLSSSATRLPESTVLASLRSTAAASPPRTISRHPLLRSISRNYSVSGSSILRTPDSRFDANSSICTSGSNLDLANVPSPWSGTWHRASAHSLCRGYLSPPIGIRNTSAHVSRSANGSPSRYVGSSRMSHGSSGQQHPHLRHCTLSGPSLFTMVPQSPQQNQLQHGGYSETNLSAAASAQSFRQLYLQHCPDSDTSSQSLPGC

SEQ ID NO: 1605 - DNA, 2373 bp, Zea mays
  CDS (490)..(1998)
gcccttccccctccgctcgccctcccccccttcccggcatgaatcgcccagtccacacgtcagttcgccctacacctcaaagcgctgcgtcccttcctccagctactactaccttggcggctccagccagcacgggtcgtacctgcggcggtgtggagagccagggacaagcctgtctaccatgatccctctgtcctcccagcagcagttcgagtcaggcgcaaccgtggccacggcgcgtcgtccgcccagtcacgggagtcctacctgacccgccaattctgtgcgggtgcacgcctgcttcatcatgggagccgacgtccgaccctggccgctgctacccccaggtacggagcaagcctaagccagtagctgcacccgaagacacagatttggagtattgagctggctctctgttttgtcggttgtgtgcttctacttcatagaaaagagctgcattttcttcttagtgctttggatgctggccagatgaagagtagtagatttctgttcctttgtgcaatgttctgtcttatggctcggctgggagctgccaatgtcgtgctaatggggaataatctgaccctgtcctttgctgatattgaggcaagcttttctccaggagtgaaaggatcaggagtcaatggcatagtttatgcttctgaacctttgaatgcctgcagcccgttaacaatcaaggcagtcaagggcccgccatctccctttgcattaattgtaagaggcggatgcacgtttgatgagaaagtgaaaaatgcacaggatgctggattcaaagctgcaattgtgtatgacaatgaaaatagtggggtcctggtttcaatggctggaagctcaagtggcatacacatatacgctgttttcgtttcgaaggcctcaggagaggtgttgaagaaatcttcaggacatactgatgtagaggtgtggatactacctacattcgacaactcagcctggtcgatcatggcaatctcattcatatcgctgcttgccatgtctgctgtattagctacgtgtttctttgtgagaaggcatcgaataaggagagaccaccctagaatcccagaagctagagagttccatggaatgagcagtcagttagttaaggctatgccaagtcttattttcacgaaagtgcaagaagataactgcacatcatcgatgtgtgccatttgtttggaagactacagtgtcggagaaaagctcagagtgctgccttgtcgtcacaagttccatgcagcttgtgtggacttgtggctaacttcttggagaacattctgccctgtatgcaagcgagacgcgacgagtggagtatcagaacttcccgccacagaggctacccccttgctttcttctgctgtccggttaccttctcagccatcttcattcaggtcgagcgtggcagcctccccacccaggccgataagccggcatccttcatcgcactcggtttctcgtgcttactctgtctctagtaccccccactcccccaaccccttcagatctcacacaaacttacctggggtcatccatgcaagcagaagcaccacagaccttgcaaacatgtcgtctccccaccctcgcatctcacacttgtcgtcgtcgacacactccctcgtcggcagccacctatctccaccaatcagcataaggtatccattgccccattctcggcatgaatcgcccagtccacacgtcagttcgccctacatctcaaattctggctacggttcttcaagctactactaccttggcggctcgagccagcacgggtcgtacctgcggcggtgtggagagtcagggccaagcctgtctaccatggtccctcggtcatcgcagcagcagttccagtcagaggcaaacgtggccgcaggcgcgtcgtctgcccagtcctcacggcagtcctacctgcgacgctgtggcgattcagacgccagcttgtctgacatggcgtcagcccagtcgttgccggggtgctgaggcagatgtgcactacaagatgcggcttgacctgtgcatacaatgaggcttgcagcgtcacataggtggggaacatgtatagcatagactttatgatcctgttcttgtctgtgagtggtatatggttctttttttgtgccttttattgtgtgcatctgacgtgacaggagcctgttgaagttgattctgttaacattttagtccgcaccatgcgtccatgccagtttctccctagatttgctactctactaccatgcacacatttgaacgaggcagtgctcagctgcatgcatctgatgttaatgttgtgctgctcgctcagtgagcatgaagagatggtcgtctgagcaaattcagaaaacagccctttgtctg

SEQ ID NO: 1606 - protein, 502 aa, Zea mays
MKSSRFLFLCAMFCLMARLGAANVVLMGNNLTLSFADIEASFSPGVKGSGVNGIVYASEPLNACSPLTIKAVKGPPSPFALIVRGGCTFDEKVKNAQDAGFKAAIVYDNENSGVLVSMAGSSSGIHIYAVFVSKASGEVLKKSSGHTDVEVWILPTFDNSAWSIMAISFISLLAMSAVLATCFFVRRHRIRRDHPRIPEAREFHGMSSQLVKAMPSLIFTKVQEDNCTSSMCAICLEDYSVGEKLRVLPCRHKFHAACVDLWLTSWRTFCPVCKRDATSGVSELPATEATPLLSSAVRLPSQPSSFRSSVAASPPRPISRHPSSHSVSRAYSVSSTPHSPNPFRSHTNLPGVIHASRSTTDLANMSSPHPRISHLSSSTHSLVGSHLSPPISIRYPLPHSRHESPSPHVSSPYISNSGYGSSSYYYLGGSSQHGSYLRRCGESGPSLSTMVPRSSQQQFQSEANVAAGASSAQSSRQSYLRRCGDSDASLSDMASAQSLPGC

SEQ ID NO: 1607 - DNA, 1955 bp, Zea mays; identical to SEQ ID NO: 1595
  CDS (220)..(1725)

SEQ ID NO: 1608 - protein, 501 aa, Zea mays
MKSSRFLFLCAMFCLMARLGAANVVLMGNNLTLSFDDIEASFSPGVKGSGVSGVVYASEPLNACSPLTIKTVNGPPSPFALIIRGGCTFDEKVKNAQDAGFKAAIVYDNKNSGVLVSMAGSSSGIHIYAVFVSKASGEVLKKFSGNMDVEVWILPTFENSAWSIMAISFVSLLAMCAVLGTCFFVRRHRIRREHPRIAEDREFHGMSSQLVKAIPSLIFTKVQEDNCTSSMCAICLADYNVGEKLRVLPCRHKFHAACVDLWLTSWRTFCPICKRDARSGASEVVATEATPLLSSAARLPSFRSSVAASPPRPISRHPSSHSVSRAYSVSSTPNSPNPFISSHISSPGIRASRSITDLGNISSLHPRISHLSSTHSLVGSHLSPPISIRYWSSHVAHSGYGSPSPHVSSSYISNSGYGSSSYCYLGLGGSSHSQHGTYLRRCGESGPSLCTMVPQQLQWETNVAAGASSAKSLRQSSYLRHCGDSDASLSDMTSAQSLPRC

SEQ ID NO: 1609 - DNA, 1370 bp, Triticum aestivum
  CDS (80)..(925)
aaagagagagaaaagcgcacgaaaagaaaacagagagaaatgaaactgccctgctgctgctgaggtcggcctcctggcgatgagcccccgccgccgtcccccgctgctcctcctcgccgccgtcgccgtcgcctgcgcctgcgccgccgcccgcccctgcgcggccctcgtccgcctcggtgccgcctccttcctcgacgcccccgcgcgcttcgggccccgggtgaccggcgacgggatatgcgggtcgctgcgcgccgcggagcccgccgacgcgtgcgcgcccgtccggggcgcccccggcgggagcggcgggatggcgttcgtgctcatcgcgcgcgggaactgcagcttcgagggcaaggtgcgggcggcgcagcgggccggcttcgacgccgcgctcgtccacgacgacgaggacaaggccagcctctactccatggttggcgatcctgagggcatacacatacctgcggtattcgtatccaaaatggctggggaaaccttgaagaagtttgccagaggtgaagatggggaatgctgtataaactcgtcgatggatgagactgcagggacagtgttggtgatgtcgttcgtatcacttgttgtcatcatatcagttgtagcttcatttcttttcgctcggaactgccgacttttacgcaatggagttgataatcgcccaccttacatcaagaagcatgtggtggaaaagcttccttctgtggtatataaagctccctgctcaagtggcaacaattgtgaagaagcctgtgccatttgtttagaagactatgataatggtgacatgcttagacttctcccatgcaaacatgagtttcatgtggagtgtattgatccctggctgacaaagtggggcacattttgcccggtatgcaaacttgaggtactcacaggtggataagcaggcaagctaggagtaagtctcaggtgaataagcaagcctccgttactgcatactcccttcgtccggaaatacttgtagaagaaatgggtaaaaatggatatatgtagaactaaaacacatccagatacatccattcccccgacaagtatttccggatggagggagtatatacaagtagtgctcggcggcatgacggttatatccaggcgtgctgaactggttgatctgttgttggctgggtttgcaagatagatcaatgccgaacattttatcatgaggatggggtatgggctgtgcggtctctgggactgggcccgtcttgatacccagtagaagattgaattgtgtcgttaacattgagatgaactgtttaattgaggtgtagtatgtggaagccatcttgtaattatatgtcagaagttcaattgcttctttcccatgc

SEQ ID NO: 1610 - protein, 281 aa, Triticum aestivum
MSPRRRPPLLLLAAVAVACACAAARPCAALVRLGAASFLDAPARFGPRVTGDGICGSLRAAEPADACAPVRGAPGGSGGMAFVLIARGNCSFEGKVRAAQRAGFDAALVHDDEDKASLYSMVGDPEGIHIPAVFVSKMAGETLKKFARGEDGECCINSSMDETAGTVLVMSFVSLVVIISVVASFLFARNCRLLRNGVDNRPPYIKKHVVEKLPSVVYKAPCSSGNNCEEACAICLEDYDNGDMLRLLPCKHEFHVECIDPWLTKWGTFCPVCKLEVLTGG

SEQ ID NO: 1611 - DNA, 1533 bp, Glycine max
  CDS (1)..(1533)
atgtttttcaaccaaaaaattgtgcttttcaaatcttttgctctgatgggtacttcaaatcttctcttgtttttctctctgatgagcctgtgtgctatggcggcttccaaggtggtgcttattgggaataatatcactctctcctttgatgatattgaagctaattttgccccagcagtcaaaggttctggaaaatatggggtcttatatttggcagaaccactggatgcgtgtgcagaattgacaaataaagttgaacaacttcccaatgcgagttcaccttttgctttggtggttagagggggatgtagctttgaggaaaaagtcagaatagcacaaaaggctggcttcaaagctgtaattgtctatgacaatgaagagggtggcatcttggttgcgatggcaggaaattctgctggtataagaatacacgctgtatttgtatctaaagcttcgggtgaaatactaaagaaatatgctgggttgactaatgtggaaatatggctcattccaacttttgaaaactcagcatggtctatcatggcaatttcatttatttccctgctagctatgtctgctgtcctggccacttgtttcttcgtccgcaagcatcgcataagaagagaaaggcctcgagcttctcttgttcgtgaatttcatggtatgagtagtcgcctagtgaaagcaatgccgagtttggtatttacttctgttttggaagataactgtacatcaagaacatgtgctatatgccttgaagactattgtgttggtgagaagctcaggattctgccctgctgtcacaagtttcatgctgcctgtgtggattcgtggcttacttcatggagaaccttttgtccagtttgcaagcgtgatgctagaaccggcttaactgatccaccaccttcagagtccacacccttgctctcatcaaccccagcatctatggcatcctctgtcttatcttctgcaagatcatcactagcttcatcttcagcaatacaaattgcccggacagcatctatggcatcctctgccttaccttctgcgagatcatctctagcttcatcttcagcaatacaaattgcccggacagcatctatggcatcctctgccttacattctgcgagatcatcactagcttcatcttcagcaatacaaatttcccgggcagcttcacagaccccatctgtttcccgtaaccactccatagccagtacaccttatgttcagccatctcttaggtcctcctaccatcaatccccctccctaagcatcagccgaagctccgtagatcttaggaatgcatcccaaagatctctagcttctcacttgaattcaccatgttccatgggatacccatctttgtcatctcttaactcaaggtacatgtctccacacattccaagtccaagcaatgcttcagtaagctatatgggttcatccagtcatcaacaacatcctctccgttatagtgagtcggctgcaagcttctccccatttgcatcgacacactcccttccagaatgttaa

SEQ ID NO: 1612 - protein, 510 aa, Glycine max
MFFNQKIVLFKSFALMGTSNLLLFFSLMSLCAMAASKVVLIGNNITLSFDDIEANFAPAVKGSGKYGVLYLAEPLDACAELTNKVEQLPNASSPFALVVRGGCSFEEKVRIAQKAGFKAVIVYDNEEGGILVAMAGNSAGIRIHAVFVSKASGEILKKYAGLTNVEIWLIPTFENSAWSIMAISFISLLAMSAVLATCFFVRKHRIRRERPRASLVREFHGMSSRLVKAMPSLVFTSVLEDNCTSRTCAICLEDYCVGEKLRILPCCHKFHAACVDSWLTSWRTFCPVCKRDARTGLTDPPPSESTPLLSSTPASMASSVLSSARSSLASSSAIQIARTASMASSALPSARSSLASSSAIQIARTASMASSALHSARSSLASSSAIQISRAASQTPSVSRNHSIASTPYVQPSLRSSYHQSPSLSISRSSVDLRNASQRSLASHLNSPCSMGYPSLSSLNSRYMSPHIPSPSNASVSYMGSSSHQQHPLRYSESAASFSPFASTHSLPEC

SEQ ID NO: 1613 - DNA, 1269 bp, Arabidopsis thaliana
  CDS (1)..(1269)
atgaatcttgttgttctgctaatcctaacattactccttttcattgtttcttatgtagtagacgcaggccaagtcattttggttgattccaacataactcgctcttttgtcgacatggaagctgatttctctccatcagtgactacggtggaaaccggagtggtttatgtagctgagcctctcaacgcttgccgaaacttgaggaataaaccggagcagagcccttatggtacttcccctcttgtgttgatcataagaggaggctgcagttttgagtacaaagtcagaaacgcgcagagaagcggtttcaaggctgccattgtctatgacaatgtggaccgcaacttcttatccgcaatggggggagactcggacggtataaagattcaagcggtttttgtgatgaagagagccggagaaatgctcaagaagtacgcgggttcggaggaaatggaagtcatgttggttcctcctaatacagaggactcggtgtggtcattgtacgcttccatagcattgatcttgtcgctggctattttttgtgttatggttacttgtgtcttcttctatagatattgctcaacaattagaaactctacatctcaattcaatgggatgtgccgtagaacggtgaaagcaatgccgagtgttacattcacttgtgcaaaaatagacaacactacaggtttctcttgcgctatctgccttgaagactacattgttggagacaagctcagggtcttaccttgcagtcacaagtttcatgtcgcttgcgtagactcgtggcttatatcatggagaacgttttgtccagtgtgtaaacgggatgcgagaacgaccgcagatgagccactagctacagagagcacaccgtttctcagttcttccattgcaacatcatctctagtgtgtatagactctcctcctttgggatcctcagtttctttctctccagcgcatgtgagctcgtccttcattcatcaatttgtcaggtcttcgccaatgaatggcagccgtatctcagagaatcttaggcgacaagcctcaccattacagtcatcatcacagcgatcacacctctctatgaagtcttcccattcactgggttattcgaccatgtcacctctcaacgcgatgggcatgtcaccataccggccatacccaagcaatgcatcgcctggattattcagttcaacaaatcatctgctttccaattatacagcaaatacattctctcatttcgcctctgcacactcgcttccggactag

SEQ ID NO: 1614 - protein, 422 aa, Arabidopsis thaliana
MNLVVLLILTLLLFIVSYVVDAGQVILVDSNITRSFVDMEADFSPSVTTVETGVVYVAEPLNACRNLRNKPEQSPYGTSPLVLIIRGGCSFEYKVRNAQRSGFKAAIVYDNVDRNFLSAMGGDSDGIKIQAVFVMKRAGEMLKKYAGSEEMEVMLVPPNTEDSVWSLYASIALILSLAIFCVMVTCVFFYRYCSTIRNSTSQFNGMCRRTVKAMPSVTFTCAKIDNTTGFSCAICLEDYIVGDKLRVLPCSHKFHVACVDSWLISWRTFCPVCKRDARTTADEPLATESTPFLSSSIATSSLVCIDSPPLGSSVSFSPAHVSSSFIHQFVRSSPMNGSRISENLRRQASPLQSSSQRSHLSMKSSHSLGYSTMSPLNAMGMSPYRPYPSNASPGLFSSTNHLLSNYTANTFSHFASAHSLPD

SEQ ID NO: 1615 - DNA, 840 bp, Arabidopsis thaliana
  CDS (1)..(840)
atgttttcagcaccagttgttagaagatcgggagaatacggattgttgtacgctgcagagcctcttgatgcgtgctcgtacttaacaaacatggcggaaaaaggttcgaaatttaggccctcgtatgtattgatcgtccgtggtggctgtagttttgaggaaaaaataagaaatgcgcaggaagctggatacaaagctgcgatcgtctataacgatagatatgaggagctcttagtacgtagaaattcatctggtgtctatatacatggtgtgcttgttacaagaacatcaggggaggtacttaaagagtataccagtcgagctgagatggagctcttgctcatcccgggattcgggatttcatcttggtcaatcatggctatcactttcgtatcgttactcgtcatttctgccgtcctagcctcttatttctctgtccgtaggcatcgaattagacagcatgtgagggatttacatcatggtggccaaggacattctcgtatgccaaaagacttgttgcaaagcatgccgactgaagtatataccggtgttcttgaagaaggttcgacttctgttacttgtgctatatgtattgatgattatcgcgttggtgaaatactcaggatcctaccttgcaaacacaaatatcatgcggtgtgtatcgattcttggctcggacgttgtagatccttttgtccggtttgtaaacaaaatccaagaacaggaaatgatgtaccaccagcatcagaaacaacacctttgatttctcctggtccgaactctattacttcactacaatcgttttatgatctaccaatagttgtcagagtatatctgtaa

SEQ ID NO: 1616 - protein, 279 aa, Arabidopsis thaliana
MFSAPVVRRSGEYGLLYAAEPLDACSYLTNMAEKGSKFRPSYVLIVRGGCSFEEKIRNAQEAGYKAAIVYNDRYEELLVRRNSSGVYIHGVLVTRTSGEVLKEYTSRAEMELLLIPGFGISSWSIMAITFVSLLVISAVLASYFSVRRHRIRQHVRDLHHGGQGHSRMPKDLLQSMPTEVYTGVLEEGSTSVTCAICIDDYRVGEILRILPCKHKYHAVCIDSWLGRCRSFCPVCKQNPRTGNDVPPASETTPLISPGPNSITSLQSFYDLPIVVRVYL

SEQ ID NO: 1617 - DNA, 957 bp, Arabidopsis thaliana
  CDS (1)..(957)
atgaactatagttggattacaatcatgtctctgttggtaatttgtaagctggcttcggcgaaagtagtgttgatcgggaaaaacacaattctatcctttgatgatgtcgaggcaactttcactccaattgttagaaactcgggggaatgtggaattttgtacgttgcagagcctcttgaggcatgctcggatataaccaacatggcggaaaaaagatcaaagtataggtcctcttatgtattgatcgtccttggtggctgtagttttgaggaaaaggttagaaaggcgcagaaagctggatacaaagctgcgattgtctataacgatggatatgatgagctcttagtacctatggcaggaaattcatctggtgtggatatacatggcttgcttgttacaagagcatcaggggaggtgcttaaagggtacgcggatcaagacgagatgaagctttggctcatcccgggattcgggatttcatcttggtccatcatgggtattacattcatatctttactcgccatgtctgctattctagccacttgtttcgttgtccgtaggcatcaaattagacagagtgtgagggatttaccacatggtggccaaggactttcttgtatgccaagagacttgttgcaaagcatgccgactgaagtatatagcggtgttcttgaagaaagttcaacttcggttacttgtgctatatgtatcgatgattattgcgttggtgaaaaactccgaatcctaccttgcaaacacaaatatcatgcggtgtgtatcgattcttggctcggacgttgtagatccttttgtccggtttgtaaacaaaatccaagaacaggaaatgatgttccaccagcatcagaaacaacacctctgatttctcctagcccgaactctattacttcactacaatcgttttatgatctaccaatagttgtcagagtatatctgtaa

SEQ ID NO: 1618 - protein, 318 aa, Arabidopsis thaliana
MNYSWITIMSLLVICKLASAKVVLIGKNTILSFDDVEATFTPIVRNSGECGILYVAEPLEACSDITNMAEKRSKYRSSYVLIVLGGCSFEEKVRKAQKAGYKAAIVYNDGYDELLVPMAGNSSGVDIHGLLVTRASGEVLKGYADQDEMKLWLIPGFGISSWSIMGITFISLLAMSAILATCFVVRRHQIRQSVRDLPHGGQGLSCMPRDLLQSMPTEVYSGVLEESSTSVTCAICIDDYCVGEKLRILPCKHKYHAVCIDSWLGRCRSFCPVCKQNPRTGNDVPPASETTPLISPSPNSITSLQSFYDLPIVVRVYL

SEQ ID NO: 1619 - DNA, 1347 bp, Arabidopsis thaliana
  CDS (1)..(1347)
atgaatcgtgctttggtcctacttttatatgtttgtactgtttcttgtttagcttcaagcaaagttattttgatgaggaataacatcactctctcttttgatgacatcgaagctaacttcgctccgtcagtgaagggtacaggtgaaattggagtggtttatgtggctgagcctcttgacgcttgtcaaaatcttatgaataaaccagaacagagctccaatgaaacttctccttttgtgttgattgttagaggaggctgtagttttgaagagaaagttagaaaagctcagagagctggtttcaaagctgctattatctatgacaatgaagaccgtggaacattgatagcaatggcaggtaactctggaggtataaggattcatgcggtctttgttacgaaagaaacgggagaagttttaaaggagtatgcgggtttccccgatacgaaagtttggttgatcccaagttttgagaactcggcgtggtctattatggcggtttcgtttatctcgctgcttgcaatgtcggctgttctcgctacttgtttctttgtgcgtaggcatcgaataagaaggcggacatctcggtcctctcgagtgcgtgagtttcacggtatgagccgccgcttggtgaaagcaatgccgagtcttatattcagttcgtttcatgaagataacactactgcattcacttgtgctatttgccttgaagactacactgttggagacaagctcaggctcttaccttgctgtcacaagtttcatgctgcgtgtgttgactcatggttaacctcttggagaactttctgtccggtgtgcaaacgagatgcaagaacgagcacgggagagcctccagcttcagagagcacgccattgctctcatctgctgcatcgtctttcacttcttcctctctgcactcttcagtcagatcatctgcactattgattggtccttccttgggctcattaccaacttcaatctctttctctcccgcatacgcaagctcatcctatattagacaatcattccagtcttcctctaaccgtcgatcacctccaataagcgtaagtcgaagctcagtggatctcagacaacaagcagcttctccatctccatcaccatcacagagatcatacatttcccatatggcttctccacagtcactaggttacccaactatctcccctttcaacacgaggtacatgtcaccgtatagacctagcccgagcaatgcatcacctgcaatggctggatcatcgaattatccgttgaatccactgcgttacagtgaatcagctggaactttctctccatacgcctctgcaaactcgcttccagactgttag

SEQ ID NO: 1620 - protein, 448 aa, Arabidopsis thaliana
MNRALVLLLYVCTVSCLASSKVILMRNNITLSFDDIEANFAPSVKGTGEIGVVYVAEPLDACQNLMNKPEQSSNETSPFVLIVRGGCSFEEKVRKAQRAGFKAAIIYDNEDRGTLIAMAGNSGGIRIHAVFVTKETGEVLKEYAGFPDTKVWLIPSFENSAWSIMAVSFISLLAMSAVLATCFFVRRHRIRRRTSRSSRVREFHGMSRRLVKAMPSLIFSSFHEDNTTAFTCAICLEDYTVGDKLRLLPCCHKFHAACVDSWLTSWRTFCPVCKRDARTSTGEPPASESTPLLSSAASSFTSSSLHSSVRSSALLIGPSLGSLPTSISFSPAYASSSYIRQSFQSSSNRRSPPISVSRSSVDLRQQAASPSPSPSQRSYISHMASPQSLGYPTISPFNTRYMSPYRPSPSNASPAMAGSSNYPLNPLRYSESAGTFSPYASANSLPDC

SEQ ID NO: 1621 - DNA, 1296 bp, Arabidopsis thaliana
  CDS (1)..(1296)
atgatccgttcttcgattgtaattttatctctgttactaatttcacacttggtttctgcaaaagttctgttgatcggtaacagcacatctctctccttcgacgacgtcgaagccactttcactccgatgattaagagatcggatcaaggcggtgtgttgtatgtagcagagccactcgatgcttgttcggatttggtgaatacggtgaatgtgaaaaatggaactactgtgtctcctccgtatgtgttgattatccgcggtggttgtagtttcgaagataagattaggaatgctcaaaaggctggttataaagctgctattgtttatgactatgaagattttgggttcttagtatcaacaactggggaagtacttaaagagtatgcgggtcgtaccgattttgaagtgtggctcatgccaagtttcgagacttcagcatggtcaatcatggctatttctttcatatctctcctcgccatgtcggctgtgctcgctacttgcttctttgtccgtaggcatcgagttaggcgtcggcgtattctggctcttaatggcaatgactttcatcgtatgcccaaaagcatgataatacgtatgcctactaccatatttaacggtatttgtgatgaagcaactacatctatattgtgctgcatatgccttgagaattatgagaaaggggacaagctaaggatcctaccttgccatcacaaatttcatgttgcttgtgtagacttgtggcttggccagaggaaatccttttgcccggtttgcaaacgcgatgcaagaagcatcagtaccgacaagcccccatcagagcacacaccctttctttctcggactcctagcatgaccccgacgtcatcgtttctcttatcatcatcctccacaaccccattgcagtcatctcatgagctaccaatatccatcagagtagacccttctttaccatccacctcaatgcagccacacacagttcctatgtatctctcccactctcgctcccacacaagcttccaaaatggatcaaaccgattttcccggcctataccagttagccggagttcagcagatctcaggaacgccgtttcccaaagatcttacaactcaccccaccaggtttctttgcctcgtttcctccactcaagatatacgcacatacttggcccgggaaatgcatcaagaagccaggttgttgggttgttaacaagccagcgcgagcattcacttcatcaaaatgactcgcgcaggtctttcattcactttgcatctgcgagctccttaccaggctggtaa

SEQ ID NO: 1622 - protein, 431 aa, Arabidopsis thaliana
MIRSSIVILSLLLISHLVSAKVLLIGNSTSLSFDDVEATFTPMIKRSDQGGVLYVAEPLDACSDLVNTVNVKNGTTVSPPYVLIIRGGCSFEDKIRNAQKAGYKAAIVYDYEDFGFLVSTTGEVLKEYAGRTDFEVWLMPSFETSAWSIMAISFISLLAMSAVLATCFFVRRHRVRRRRILALNGNDFHRMPKSMIIRMPTTIFNGICDEATTSILCCICLENYEKGDKLRILPCHHKFHVACVDLWLGQRKSFCPVCKRDARSISTDKPPSEHTPFLSRTPSMTPTSSFLLSSSSTTPLQSSHELPISIRVDPSLPSTSMQPHTVPMYLSHSRSHTSFQNGSNRFSRPIPVSRSSADLRNAVSQRSYNSPHQVSLPRFLHSRYTHILGPGNASRSQVVGLLTSQREHSLHQNDSRRSFIHFASASSLPGW

SEQ ID NO: 1623 - DNA, 873 bp, Arabidopsis thaliana
  CDS (1)..(873)
atgagactcgtcgtctcaagctgtctactagttgcagctccttttctctcctctctgttacgagtctcactcgccactgttgtcctcaattccatctccgcctcttttgccgatctcccagccaaatttgacggctccgtgaccaaaaacggaatctgtggagctctatacgtcgcagatcctctcgacggttgctcaccgcttctccacgccgccgcatccaactggacgcaacacagaactactaagttcgctttgataatcagaggcgaatgttcttttgaggataagctgctcaatgcccagaactcaggttttcaagctgtgattgtctatgacaacattgacaacgaagatctcatcgtcatgaaggtgaaccctcaggacattacagttgatgcagtcttcgtttcaaatgtcgccggtgagattttgagaaagtacgcgagaggccgagatggtgaatgctgccttaatccgccagacagagggagcgcttggactgtgttggccatctccttcttctctctccttcttatagtcactttcctgttgattgccttctttgcacccagacactggacccaatggcgagggaggcacaccaggaccatcaggttagatgcaaagctcgtccacacactcccctgcttcaccttcactgattctgctcaccacaaggccggggaaacatgtgctatatgtctcgaggattacagatttggagaaagcctcagacttctcccctgccaacatgcttttcacttgaattgcatcgactcttggttgacaaaatggggtacatcttgccctgtgtgcaagcatgacataagaaccgagactatgtcttctgaggtgatcctgttagactga

SEQ ID NO: 1624 - protein, 290 aa, Arabidopsis thaliana
MRLVVSSCLLVAAPFLSSLLRVSLATVVLNSISASFADLPAKFDGSVTKNGICGALYVADPLDGCSPLLHAAASNWTQHRTTKFALIIRGECSFEDKLLNAQNSGFQAVIVYDNIDNEDLIVMKVNPQDITVDAVFVSNVAGEILRKYARGRDGECCLNPPDRGSAWTVLAISFFSLLLIVTFLLIAFFAPRHWTQWRGRHTRTIRLDAKLVHTLPCFTFTDSAHHKAGETCAICLEDYRFGESLRLLPCQHAFHLNCIDSWLTKWGTSCPVCKHDIRTETMSSEVILLD

SEQ ID NO: 1625 - DNA, 1614 bp, Oryza sativa (japonica cultivar-group)
  CDS (1)..(1614)
atgaatcgaagaagaacaatgctattgcttatctgtctctgtgcaacattttgcctcatgactcagttaggagctgcaaatgtagtgctgatggggacaaatctgactttgtcgtttgatgatgttgaggcaagttttgctccaggagtgaaaggttcaggttttgaaggcgttgtttatactgctgaacctttggacgcctgcagtccgttaacaagtaaagcagaaaagggtccaccatctccatttgcactgatcataagaggcgggtgcacatttgatgaaaaagtaaaaaatgcacaggatgctggattcaaagctgcaatagtatacgacaatgaaaatagcggggttctgatttcaagtaattttacagtggctggaagctcaggtggtattcacatttatgcggtgttcatctcgaaggcctcaggggaggtgttgaagaaattttcaggccatactgatgtagaggtgtggatactacctgcgtttgagaactcagcctggtcaatcatggcaatttcattcatatctctgcttgccatgtctgcggttctagctacttgtttctttgtgagaagacatcatataaggcgggaccggcctagaattccagaagcccgagaattccatggaatgagcagtcaattagtcaaggcaatgccaagccttatcttcacgaaggtgcaagaggacaactgcacatcatcaatgtgtgccatttgcttggaagactacaatgtcggagaaaaattaagagtgttgccttgccgtcacaagttccatgcagcttgtgtggacctttggctcacaacttggagaactttttgccctgtatgcaaacgtgatgcaagtactggaataccagatcctccagcctcagagactacaccattgctttcttctgcagttcgtttgccttctcagtcatcttcgttccggtcaagcgtggcagcatcgcctccaagaccaataagtcgacgaccttcatcacagtccatatctcggatttatgctgcttctggtacccccaactctcctaaccccataaggtctttcacaaactcaactgccatgagcataagtagaagcaatgtggacttatcaaacatgtcttcccgccctcgcgcctcacacctcgcctccgcacattctttggttggcagtcacttgtctccaccaatcaatataaggtacgcatcgccgcatatgtcccactctggctatgcatcacctagtccacatgttagctcatcctatgtctccaactctgggtatggatcttcaagctactatctcggttcatccagccagcatcggtcatacctaaggcgctgtggggaatcagggcctagcttgtctaccatggcccctcagtcgccgcaacagtcccagttacgtcatggcggcgaatccgacttaaatctagcaggagcatcctcaggccagtctttccggcaatcctacctgagacactgtgctgattcagaggtaaatctagcaggagcatcctcaggccagtctttccggcaatcctatctgagacactgtgctgattcagatgcaagcttatctgccatggcatcagctcaatccttgccaggatgctga

SEQ ID NO: 1626 - protein, 537 aa, Oryza sativa (japonica cultivar-group)
MNRRRTMLLLICLCATFCLMTQLGAANVVLMGTNLTLSFDDVEASFAPGVKGSGFEGVVYTAEPLDACSPLTSKAEKGPPSPFALIIRGGCTFDEKVKNAQDAGFKAAIVYDNENSGVLISSNFTVAGSSGGIHIYAVFISKASGEVLKKFSGHTDVEVWILPAFENSAWSIMAISFISLLAMSAVLATCFFVRRHHIRRDRPRIPEAREFHGMSSQLVKAMPSLIFTKVQEDNCTSSMCAICLEDYNVGEKLRVLPCRHKFHAACVDLWLTTWRTFCPVCKRDASTGIPDPPASETTPLLSSAVRLPSQSSSFRSSVAASPPRPISRRPSSQSISRIYAASGTPNSPNPIRSFTNSTAMSISRSNVDLSNMSSRPRASHLASAHSLVGSHLSPPINIRYASPHMSHSGYASPSPHVSSSYVSNSGYGSSSYYLGSSSQHRSYLRRCGESGPSLSTMAPQSPQQSQLRHGGESDLNLAGASSGQSFRQSYLRHCADSEVNLAGASSGQSFRQSYLRHCADSDASLSAMASAQSLPGC

SEQ ID NO: 1627 - DNA, 1488 bp, Oryza sativa (japonica cultivar-group)
  CDS (1)..(1488)
atgaattgctgttcaagtgaagcggttttaagttccaaagtggcgcttctgaattcactcttctgtactatagtattgccaaaggagaattgctctaataagatgaactgtacaaaaggagggggatttccccttttgttttgcgcagtcatttgtctcatggcccaacagggggcttgcaatgtggtgctaatagcgaataacactaccttgtcatttgatgatgtcgaggcaacttttactccagaagtgaaagattcaggtgtaaatggtgcaatttacgctgtggaacctctggatgcatgtagtccattgagaaagaaagcagccaatggtcctgtttcaccatttgcactggtcatacgaggtggttgccaatttgacgataaagttagaaatgcacagaatgccggatttaaggctgtgatagtatatgatgatgaagacagtggtgtcctggtttcaatggctgggagctcgtccgggatctacatatatgcggtattcctctctaaggcttcaggagaggttttgaagaaatattcaggtcaaagtgatgtagaggtgtggatactaccagtatatgaaaactcagcttggtctatcatggcaatttctttcacatcactgcttgctatggctgctgttctagctacttgtttctttgtgaggagacaccagataaggcgggacaggggaaggattcctgtaacccgggaatttcatggaatgagcagtcaattggttaaagcaatgccaagtcttatttttacaaaagtgcaagaagacaatagtacatcatcatcttgtgccatttgcttggaagactacagttttggagaaaagctaagagtgttgccttgtcgtcacaagttccatgcgacttgtgtggacatgtggttgacctcgtggaagacattctgccctgtgtgcaagcgagatgcaagtgctggaacctcaaaaccccctgcatcggagtccacccctttgctttcttctgttattcatctgtctgctgaatcaacagctttgtcttcttttcggtcaacggtggcagtatctccccctaggccaataagacgtcatccttcatcacagtccacatcccgcgcttactccatttccagtgccccccgcaattataaccttcaaagatattacactaactcaccttatattagtacgagtagaagcaatgtagatcttgcaaatatgtcatcacaatggtctcacactccgcaccaagcatccatgcattctctaagaagtggccatttgtctctaccgatcaacatcaggtatacaataccacatgtttctcgttctgactatggatctgccagcctgggtttatcccatgattcctgttctcaccatggatctccgagttattatcatagctctttgggccagcaacgttcttacctgatgcaccgcaccgagtcagggccaagcctgtctactatggtgctccagtcgccacaatag

SEQ ID NO: 1628 - protein, 495 aa, Oryza sativa (japonica cultivar-group)
MNCCSSEAVLSSKVALLNSLFCTIVLPKENCSNKMNCTKGGGFPLLFCAVICLMAQQGACNVVLIANNTTLSFDDVEATFTPEVKDSGVNGAIYAVEPLDACSPLRKKAANGPVSPFALVIRGGCQFDDKVRNAQNAGFKAVIVYDDEDSGVLVSMAGSSSGIYIYAVFLSKASGEVLKKYSGQSDVEVWILPVYENSAWSIMAISFTSLLAMAAVLATCFFVRRHQIRRDRGRIPVTREFHGMSSQLVKAMPSLIFTKVQEDNSTSSSCAICLEDYSFGEKLRVLPCRHKFHATCVDMWLTSWKTFCPVCKRDASAGTSKPPASESTPLLSSVIHLSAESTALSSFRSTVAVSPPRPIRRHPSSQSTSRAYSISSAPRNYNLQRYYTNSPYISTSRSNVDLANMSSQWSHTPHQASMHSLRSGHLSLPINIRYTIPHVSRSDYGSASLGLSHDSCSHHGSPSYYHSSLGQQRSYLMHRTESGPSLSTMVLQSPQ

SEQ ID NO: 1629 - DNA, 2146 bp, Oryza sativa
  CDS (395)..(1900)
gatctccctccctccctccctcattattgattgattgattcgcagattcgccgctgccaccgcatcccgcccacccaccgcgcgccaccgcctccgccgccgacgagcccccgcggccaccgccaccgccacctcatcttctctcccaccaccgctccacagccgccctcccttacatggaagtcgacgtctccatcgccacgcccgcaccgcaggaatcttagctgattggtgctttggactgcaggtctggacacgttgtccgtttcctgcttgtgcagacgtaggtttggagtctttctgagtgttaaggtggctttcctttttgtccttccatggttgaaatttgtatgaacaaccttgactttctcgaagatctgtgttggtcgataagatgaatcgaagaagaacaatgctattgcttatctgtctctgtgcaacattttgcctcatgactcagttaggagctgcaaatgtagtgctgatggggacaaatctgactttgtcgtttgatgatgttgaggcaagttttgctccaggagtgaaaggttcaggttttgaaggcgttgtttatactgctgaacctttggacgcctgcagtccgttaacaagtaaagcagaaaagggtccaccatctccatttgcactgatcataagaggcgggtgcacatttgatgaaaaagtaaaaaatgcacaggatgctggattcaaagctgcaatagtatacgacaatgaaaatagcggggttctgatttcaatggctggaagctcaggtggtattcacatttatgcggtgttcatctcgaaggcctcaggggaggtgttgaagaaattttcaggccatactgatgtagaggtgtggatactacctgcgtttgagaactcagcctggtcaatcatggcaatttcattcatatctctgcttgccatgtctgcggttctagctacttgtttctttgtgagaagacatcatataaggcgggaccggcctagaattccagaagcccgagaattccatggaatgagcagtcaattagtcaaggcaatgccaagccttatcttcacgaaggtgcaagaggacaactgcacatcatcaatgtgtgccatttgcttggaagactacaatgtcggagaaaaattaagagtgttgccttgccgtcacaagttccatgcagcttgtgtggacctttggctcacaacttggagaactttttgccctgtatgcaaacgtgatgcaagtactggaataccagatcctccagcctcagagactacaccattgctttcttctgcagttcgtttgccttctcagtcatcttcgttccggtcaagcgtggcagcatcgcctccaagaccaataagtcgacgaccttcatcacagtccatatctcggatttatgctgcttctggtacccccaactctcctaaccccataaggtctttcacaaactcaactgccatgagcataagtagaagcaatgtggacttatcaaacatgtcttcccgccctcgcgcctcacacctcgcctccgcacattctttggttggcagtcacttgtctccaccaatcaatataagctactatctcggttcatccagccagcatcggtcatacctaaggcgctgtggggaatcagggcctagcttgtctaccatggcccctcagtcgccgcaacagtcccagttacgtcatggcggcgaatccgacttaaatctagcaggagcatcctcaggccagtctttccggcaatcctacctgagacactgtgctgattcagaggtaaatctagcaggagcatcctcaggccagtctttccggcaatcctatctgagacactgtgctgattcagatgcaagcttatctgccatggcatcagctcaatccttgccaggatgctgatttctctgggatcagatcagcttctgtctgtactaagacctggcgtgacttgtgtatacatttgaggcatgtactataggctattggttgagagaaaatggtcgtatttgtttgtgtttctcctgctgccctgcccttttggttgtagtgattgttagcgctctatttgtttcaccctagagtgtatagtacaattgtacagcaactttcttttaaactaagcaatatcatccgcgcgttgcccgt

SEQ ID NO: 1630 - protein, 501 aa, Oryza sativa
MNRRRTMLLLICLCATFCLMTQLGAANVVLMGTNLTLSFDDVEASFAPGVKGSGFEGVVYTAEPLDACSPLTSKAEKGPPSPFALIIRGGCTFDEKVKNAQDAGFKAAIVYDNENSGVLISMAGSSGGIHIYAVFISKASGEVLKKFSGHTDVEVWILPAFENSAWSIMAISFISLLAMSAVLATCFFVRRHHIRRDRPRIPEAREFHGMSSQLVKAMPSLIFTKVQEDNCTSSMCAICLEDYNVGEKLRVLPCRHKFHAACVDLWLTTWRTFCPVCKRDASTGIPDPPASETTPLLSSAVRLPSQSSSFRSSVAASPPRPISRRPSSQSISRIYAASGTPNSPNPIRSFTNSTAMSISRSNVDLSNMSSRPRASHLASAHSLVGSHLSPPINISYYLGSSSQHRSYLRRCGESGPSLSTMAPQSPQQSQLRHGGESDLNLAGASSGQSFRQSYLRHCADSEVNLAGASSGQSFRQSYLRHCADSDASLSAMASAQSLPGC

SEQ ID NO: 1631 - DNA, 1378 bp, Arabidopsis thaliana
  CDS (73)..(1347)
atgaatcgtgctttggtcctacttttatatgtttgtactgtttcttgtttagcttcaagcaaagttattttgatgaggaataacatcactctctcttttgatgacatcgaagctaacttcgctccgtcagtgaagggtacaggtgaaattggagtggtttatgtggctgagcctcttgacgcttgtcaaaatcttatgaataaaccagaacagagctccaatgaaacttctccttttgtgttgattgttagaggaggctgtagttttgaagagaaagttagaaaagctcagagagctggtttcaaagctgctattatctatgacaatgaagaccgtggaacattgatagcaatggcaggtaactctggaggtataaggattcatgcggtctttgttacgaaagaaacgggagaagttttaaaggagtatgcgggtttccccgatacgaaagtttggttgatcccaagttttgagaactcggcgtggtctattatggcggtttcgtttatctcgctgcttgcaatgtcggctgttctcgctacttgtttctttgtgcgtaggcatcgaataagaaggcggacatctcggtcctctcgagtgcgtgagtttcacggtatgagccgccgcttggtgaaagcaatgccgagtcttatattcagttcgtttcatgaagataacactactgcattcacttgtgctatttgccttgaagactacactgttggagacaagctcaggctcttaccttgctgtcacaagtttcatgctgcgtgtgttgactcatggttaacctcttggagaactttctgtccggtgtgcaaacgagatgcaagaacgagcacgggagagcctccagcttcagagagcacgccattgctctcatctgctgcatcgtctttcacttcttcctctctgcactcttcagtcagatcatctgcactattgattggtccttccttgggctcattaccaacttcaatctctttctctcccgcatacgcaagctcatcctatattagacaatcattccagtcttcctctaaccgtcgatcacctccaataagcgtaagtcgaagctcagtggatctcagacaacaagcagcttctccatctccatcaccatcacagagatcatacatttcccatatggcttctccacagtcactaggttacccaactatctcccctttcaacacgaggtacatgtcaccgtatagacctagcccgagcaatgcatcacctgcaatggctggatcatcgaattatccgttgaatccactgcgttacagtgaatcagctggaactttctctccatacgcctctgcaaactcgcttccagactgttagaaagtctacagaaccaaccactcttggttca

SEQ ID NO: 1632 - protein, 424 aa, Arabidopsis thaliana
MRNNITLSFDDIEANFAPSVKGTGEIGVVYVAEPLDACQNLMNKPEQSSNETSPFVLIVRGGCSFEEKVRKAQRAGFKAAIIYDNEDRGTLIAMAGNSGGIRIHAVFVTKETGEVLKEYAGFPDTKVWLIPSFENSAWSIMAVSFISLLAMSAVLATCFFVRRHRIRRRTSRSSRVREFHGMSRRLVKAMPSLIFSSFHEDNTTAFTCAICLEDYTVGDKLRLLPCCHKFHAACVDSWLTSWRTFCPVCKRDARTSTGEPPASESTPLLSSAASSFTSSSLHSSVRSSALLIGPSLGSLPTSISFSPAYASSSYIRQSFQSSSNRRSPPISVSRSSVDLRQQAASPSPSPSQRSYISHMASPQSLGYPTISPFNTRYMSPYRPSPSNASPAMAGSSNYPLNPLRYSESAGTFSPYASANSLPDC

SEQ ID NO: 1633 - DNA, 1404 bp, Arabidopsis thaliana
  CDS (2)..(1336)
  misc_feature (161)..(161): n is a, g, c or t
  misc_feature (194)..(194): n is a, g, c or t
tttggtcctacttttatatgtttgtactgtttcttgtttagcttcaagcaaagttattttgatgaggaataacatcactctctcttttgatgacatcgaagctaacatcgctccgtcagtgaagggtacaggtgaaattggagtggtttatgtggctgagnctcttgacgcttgtcaaaatcttatgaataaancagaacagagctccaatgaaacttctccttttgtgttgattgttagaggaggctgtagttttgaagagaaagttagaaaagctcagagagctggtttcaaagctgctattatctatgacaatgaagaccgtggaacattgatagcaatggcaggtaactctggaggtataaggattcatgcggtctttgttacgaaagaaacgggagaagttttaaaggagtatgcgggtttccccgatacgaaagtttggttgatcccaagttttgagaactcggcgtggtctattatggcggtttcgtttatctcgctgcttgcaatgtcggctgttctcgctacttgtttctttgtgcgtaggcatcgaataagaaggcggacatctcggtcctctcgagtgcgtgagtttcacggtatgagccgccgcttggtgaaagcaatgccgagtcttatattcagttcgtttcatgaagataacactactgcattcacttgtgctatttgccttgaagactacactgttggagacaagctcaggctcttaccttgctgtcacaagtttcatgctgcgtgtgttgactcatggttaacctcttggagaactttctgtccggtgtgcaaacgagatgcaagaacgagcacgggagagcctccagcttcagagagcacgccattgctctcatctgctgcatcgtctttcacttcttcctctctgcactcttcagtcagatcatctgcactattgattggtccttccttgggctcattaccaacttcaatctctttctctcccgcatacgcaagctcatcctatattagacaatcattccagtcttcctctaaccgtcgatcacctccaataagcgtaagtcgaagctcagtggatctcagacaacaagcagcttctccatctccatcaccatcacagagatcatacatttcccatatggcttctccacagtcactaggttacccaactatctcccctttcaacacgaggtacatgtcaccgtatagacctagcccgagcaatgcatcacctgcaatggctggatcatcgaattatccgttgaatccactgcgttacagtgaatcagctggaactttctctccatacgcctctgcaaactcgcttccagactgttagaaagtctacagaaccaaccactcttggttcaggtcatataagattatttcttttgcatttgagtttta

SEQ ID NO: 1634 - protein, 444 aa, Arabidopsis thaliana
  misc_feature (54)..(54): The Xaa at location 54 stands for Ala, Pro, Ser, or Thr.
  misc_feature (65)..(65): The Xaa at location 65 stands for Ala, Pro, Ser, or Thr.
LVLLLYVCTVSCLASSKVILMRNNITLSFDDIEANIAPSVKGTGEIGVVYVAEXLDACQNLMNKXEQSSNETSPFVLIVRGGCSFEEKVRKAQRAGFKAAIIYDNEDRGTLIAMAGNSGGIRIHAVFVTKETGEVLKEYAGFPDTKVWLIPSFENSAWSIMAVSFISLLAMSAVLATCFFVRRHRIRRRTSRSSRVREFHGMSRRLVKAMPSLIFSSFHEDNTTAFTCAICLEDYTVGDKLRLLPCCHKFHAACVDSWLTSWRTFCPVCKRDARTSTGEPPASESTPLLSSAASSFTSSSLHSSVRSSALLIGPSLGSLPTSISFSPAYASSSYIRQSFQSSSNRRSPPISVSRSSVDLRQQAASPSPSPSQRSYISHMASPQSLGYPTISPFNTRYMSPYRPSPSNASPAMAGSSNYPLNPLRYSESAGTFSPYASANSLPDC

SEQ ID NO: 1635 - DNA, 834 bp, Hordeum vulgare
  CDS (1)..(834)
atgaacccccgccgccgcctcctcctgctcctcgccgccgtcgccttcacctgcgccgccgcccgcccctgcgcggccctcgtccgcctcggcgccgccaccttcctcgacgcccccgcgcgcttcgggccccgggtgaccagcgacgggatatgcgggtcgctgcgcgccgcggaccccgccgacgcgtgcacgcccgtcagggccgcccctggctccggcgggatggcgttcgtgctgatcgcgcgcgggaactgcagcttcgagggcaaggtgcgggcggcgcagctggccggcttcgacgccgccctcgtccacgacgacgaggacaaggccagcctctactccatggttggtgatcctgagggcatacacatacctgcggtattcgtatccaaaatggctgggcaaactttgaagaagtttgctagaggtgaagatggtgagtgctgcataaactcctcgatggatgagactgcagggacagtgttggtgatgtcgttcgtatcacttgttgtcatcatatcagttgtagcttcatttcttttcgctcggaactgccgacttttacgccatggagttgataaccacccaccttgcatcaagaagcatgtggtggaaaagattccttccttggtatataaagctccctgctcaagtggcaacaattgtgaagaagcctgtgccatttgtttagaagactatgataatggtgacatgcttagacttctcccatgcaaacatgaatttcatgtggagtgtattgatccctggctgacaaagtggggcacattttgcccagtatgtaaacttgaagtaaccacaggtgaataa

SEQ ID NO: 1636 - protein, 277 aa, Hordeum vulgare
MNPRRRLLLLLAAVAFTCAAARPCAALVRLGAATFLDAPARFGPRVTSDGICGSLRAADPADACTPVRAAPGSGGMAFVLIARGNCSFEGKVRAAQLAGFDAALVHDDEDKASLYSMVGDPEGIHIPAVFVSKMAGQTLKKFARGEDGECCINSSMDETAGTVLVMSFVSLVVIISVVASFLFARNCRLLRHGVDNHPPCIKKHVVEKIPSLVYKAPCSSGNNCEEACAICLEDYDNGDMLRLLPCKHEFHVECIDPWLTKWGTFCPVCKLEVTTGE

SEQ ID NO: 1637 - DNA, 31 bp, Artificial sequence
  primer
atagagctcctctctgttacgagtctcactc

SEQ ID NO: 1638 - DNA, 36 bp, Artificial sequence
  primer
atacccgggattgtcaatgttgtcatagacaatcac

SEQ ID NO: 1639 - DNA, 21 bp, Artificial sequence
  primer
atgagactcgtcgtctcaagc

SEQ ID NO: 1640 - DNA, 21 bp, Artificial sequence
  primer
ctaacggctttgactggattg

SEQ ID NO: 1641 - DNA, 31 bp, Artificial sequence
  primer
ataccatggctctctgttacgagtctcactc

SEQ ID NO: 1642 - DNA, 38 bp, Artificial sequence
  primer
atattaattaaattgtcaatgttgtcatagacaatcac

SEQ ID NO: 1643 - DNA, 31 bp, Artificial sequence
  primer
ataggtaccctctctgttacgagtctcactc

SEQ ID NO: 1644 - DNA, 36 bp, Artificial sequence
  primer
atagtcgacattgtcaatgttgtcatagacaatcac

SEQ ID NO: 1645 - protein, 263 aa, Artificial sequence
  consensus sequence
  Variant (2)..(2): Xaa in position 2 is any amino acid
  Variant (4)..(5): Xaa in position 4 to 5 is any amino acid
  Variant (6)..(10): Xaa in position 6 to 10 is any or no amino acid
  Variant (13)..(13): Xaa in position 13 is any amino acid
  Variant (15)..(16): Xaa in position 15 to 16 is any amino acid
  Variant (18)..(18): Xaa in position 18 is any amino acid
  Variant (20)..(20): Xaa in position 20 is any amino acid
  Variant (22)..(22): Xaa in position 22 is any amino acid
  Variant (24)..(25): Xaa in position 24 to 25 is any amino acid
  Variant (26)..(26): Xaa in position 26 is any or no amino acid
  Variant (28)..(29): Xaa in position 28 to 29 is any amino acid
  Variant (31)..(32): Xaa in position 31 to 32 is any amino acid
  Variant (34)..(35): Xaa in position 34 to 35 is any amino acid
  Variant (38)..(39): Xaa in position 38 to 39 is any amino acid
  Variant (42)..(43): Xaa in position 42 to 43 is any amino acid
  Variant (45)..(54): Xaa in position 45 to 54 is any amino acid
  Variant (55)..(59): Xaa in position 55 to 59 is any or no amino acid
  Variant (61)..(61): Xaa in position 61 is any amino acid
  Variant (64)..(64): Xaa in position 64 is any amino acid
  Variant (67)..(67): Xaa in position 67 is any amino acid
  Variant (69)..(69): Xaa in position 69 is any amino acid
  Variant (71)..(72): Xaa in position 71 to 72 is any amino acid
  Variant (74)..(76): Xaa in position 74 to 76 is any amino acid
  Variant (79)..(79): Xaa in position 79 is any amino acid
  Variant (83)..(83): Xaa in position 83 is any amino acid
  Variant (85)..(85): Xaa in position 85 is any amino acid
  Variant (90)..(92): Xaa in position 90 to 92 is any amino acid
  Variant (93)..(95): Xaa in position 93 to 95 is any or no amino acid
  Variant (97)..(98): Xaa in position 97 to 98 is any amino acid
  Variant (99)..(102): Xaa in position 99 to 102 is any or no amino acid
  Variant (104)..(104): Xaa in position 104 is any amino acid
  Variant (106)..(108): Xaa in position 106 to 108 is any amino acid
  Variant (110)..(111): Xaa in position 110 to 111 is any amino acid
  Variant (113)..(113): Xaa in position 113 is any amino acid
  Variant (117)..(120): Xaa in position 117 to 120 is any amino acid
  Variant (121)..(121): Xaa in position 121 is any or no amino acid
  Variant (124)..(124): Xaa in position 124 is any amino acid
  Variant (127)..(134): Xaa in position 127 to 134 is any amino acid
  Variant (136)..(139): Xaa in position 136 to 139 is any amino acid
  Variant (141)..(144): Xaa in position 141 to 144 is any amino acid
  Variant (145)..(145): Xaa in position 145 is any or no amino acid
  Variant (149)..(151): Xaa in position 149 to 151 is any amino acid
  Variant (153)..(153): Xaa in position 153 is any amino acid
  Variant (154)..(154): Xaa in position 154 is any or no amino acid
  Variant (157)..(157): Xaa in position 157 is any amino acid
  Variant (161)..(165): Xaa in position 161 to 165 is any amino acid
  Variant (167)..(169): Xaa in position 167 to 169 is any amino acid
  Variant (172)..(172): Xaa in position 172 is any amino acid
  Variant (174)..(174): Xaa in position 174 is any amino acid
  Variant (176)..(193): Xaa in position 176 to 193 is any amino acid
  Variant (194)..(198): Xaa in position 194 to 198 is any or no amino acid
  Variant (200)..(202): Xaa in position 200 to 202 is any amino acid
  Variant (204)..(218): Xaa in position 204 to 218 is any amino acid
  Variant (219)..(220): Xaa in position 219 to 220 is any or no amino acid
  Variant (229)..(230): Xaa in position 229 to 230 is any amino acid
  Variant (232)..(233): Xaa in position 232 to 233 is any amino acid
  Variant (236)..(236): Xaa in position 236 is any amino acid
  Variant (240)..(240): Xaa in position 240 is any amino acid
  Variant (242)..(242): Xaa in position 242 is any amino acid
  Variant (245)..(246): Xaa in position 245 to 246 is any amino acid
  Variant (248)..(248): Xaa in position 248 is any amino acid
  Variant (250)..(250): Xaa in position 250 is any amino acid
  Variant (254)..(254): Xaa in position 254 is any amino acid
  Variant (256)..(256): Xaa in position 256 is any amino acid
VXLXXXXXXXSFXDXXAXFXPXVXXXGXXGXXYXXEPXXACXXLXXXXXXXXXXXXXXXFXLIXRGXCXFXXKXXXAQXAGFXAXIVYDXXXXXXLXXXXXXMXGXXXGXXIXAVFXXXXXGEXLKXXXXXXXXEXXXXPXXXXXSAWXXXAXXSFXSLLXXXXXLXXXFFXRXHXXXXXXXXXXXXXXXXXXXXXXXVXXXPXXXXXXXXXXXXXXXXXCAICLEDYXXGXXLRXLPCXHXFHXXCXDXWLTXWXTFCPVCK

SEQ ID NO: 1646 - protein, 53 aa, Artificial sequence
  protein pattern
  Variant (2)..(4): Xaa in position 2 to 4 is any or no amino acid
  Variant (9)..(9): Xaa in position 9 is Ile or Leu
  Variant (10)..(10): Xaa in position 10 is Ala, Asp or Glu
  Variant (13)..(13): Xaa in position 13 is any amino acid
  Variant (14)..(14): Xaa in position 14 is Phe or Val
  Variant (16)..(16): Xaa in position 16 is Asp, Glu or Gly
  Variant (17)..(18): Xaa in position 17 to 18 is any amino acid
  Variant (20)..(20): Xaa in position 20 is Ile, Leu or Val
  Variant (24)..(24): Xaa in position 24 is any amino acid
  Variant (26)..(26): Xaa in position 26 is any amino acid
  Variant (27)..(27): Xaa in position 27 is Phe or Tyr
  Variant (29)..(29): Xaa in position 29 is Ala, Leu or Val
  Variant (30)..(30): Xaa in position 30 is Ala, Asn, Thr or Val
  Variant (32)..(32): Xaa in position 32 is Ile or Val
  Variant (34)..(34): Xaa in position 34 is any amino acid
  Variant (37)..(40): Xaa in position 37 to 40 is any amino acid
  Variant (41)..(41): Xaa in position 41 is Ser or Thr
  Variant (42)..(42): Xaa in position 42 is any amino acid
  Variant (45)..(45): Xaa in position 45 is Ile or Val
  Variant (48)..(48): Xaa in position 48 is any amino acid
  Variant (49)..(49): Xaa in position 49 is Asp or Asn
  Variant (50)..(50): Xaa in position 50 is Ala, Ile or Pro
  Variant (51)..(51): Xaa in position 51 is any amino acid
  Variant (52)..(52): Xaa in position 52 is Ala, Ser or Thr
  Variant (53)..(53): Xaa in position 53 is Glu, Gly, Ser or Thr
TXXXCAICXXDYXXGXXXRXLPCXHXXHXXCXDXWLXXXXXXCPXCKXXXXXX

SEQ ID NO: 1647 - protein, 39 aa, Artificial sequence
  protein pattern
  Variant (2)..(6): Xaa in position 2 to 6 is any amino acid
  Variant (8)..(8): Xaa in position 8 is Glu, Gly or Asn
  Variant (10)..(10): Xaa in position 10 is Gln, Ser or Thr
  Variant (12)..(12): Xaa in position 12 is Asp or Glu
  Variant (13)..(13): Xaa in position 13 is Asp, Glu or Gly
  Variant (15)..(15): Xaa in position 15 is Ile, Leu or Val
  Variant (16)..(17): Xaa in position 16 to 17 is any amino acid
  Variant (20)..(20): Xaa in position 20 is any amino acid
  Variant (21)..(21): Xaa in position 21 is Ala or Ser
  Variant (24)..(24): Xaa in position 24 is any amino acid
  Variant (26)..(26): Xaa in position 26 is Ala, Ser or Val
  Variant (27)..(27): Xaa in position 27 is Ile, Leu or Val
  Variant (28)..(28): Xaa in position 28 is Ile or Val
  Variant (29)..(29): Xaa in position 29 is His or Tyr
  Variant (30)..(31): Xaa in position 30 to 31 is Asp or Asn
  Variant (32)..(32): Xaa in position 32 is any amino acid
  Variant (33)..(33): Xaa in position 33 is Asp, Glu or Asn
  Variant (34)..(34): Xaa in position 34 is any amino acid
  Variant (35)..(35): Xaa in position 35 is Ala, Asp, Glu or Gly
  Variant (36)..(36): Xaa in position 36 is any amino acid
  Variant (38)..(38): Xaa in position 38 is any amino acid
  Variant (39)..(39): Xaa in position 39 is Ala, Ser or Val
FXXXXXGXCXFXXKXXXAQXXGFXAXXXXXXXXXXXLXX

SEQ ID NO: 1648 - protein, 41 aa, Artificial sequence
  protein pattern
  Variant (3)..(3): Xaa in position 3 is any amino acid
  Variant (5)..(5): Xaa in position 5 is Lys or Arg
  Variant (6)..(6): Xaa in position 6 is Glu or Lys
  Variant (7)..(7): Xaa in position 7 is any amino acid
  Variant (8)..(8): Xaa in position 8 is Ala or Ser
  Variant (9)..(11): Xaa in position 9 to 11 is any amino acid
  Variant (12)..(12): Xaa in position 12 is Asp or Asn
  Variant (13)..(13): Xaa in position 13 is any amino acid
  Variant (14)..(14): Xaa in position 14 is Glu or Lys
  Variant (15)..(16): Xaa in position 15 to 16 is any amino acid
  Variant (17)..(17): Xaa in position 17 is Ile or Leu
  Variant (18)..(18): Xaa in position 18 is any amino acid
  Variant (19)..(19): Xaa in position 19 is Pro or Ser
  Variant (20)..(21): Xaa in position 20 to 21 is any amino acid
  Variant (22)..(22): Xaa in position 22 is Asp, Glu or Arg
  Variant (23)..(23): Xaa in position 23 is Glu, Gly, Asn or Thr
  Variant (24)..(24): Xaa in position 24 is Ser or Thr
  Variant (26)..(26): Xaa in position 26 is any amino acid
  Variant (27)..(27): Xaa in position 27 is Pro, Ser or Thr
  Variant (28)..(28): Xaa in position 28 is Ile or Val
  Variant (29)..(29): Xaa in position 29 is Leu or Met
  Variant (30)..(30): Xaa in position 30 is Ala or Val
  Variant (31)..(31): Xaa in position 31 is Ile, Met or Val
  Variant (34)..(34): Xaa in position 34 is any amino acid
  Variant (37)..(37): Xaa in position 37 is Leu or Val
  Variant (38)..(38): Xaa in position 38 is Ala, Leu or Val
  Variant (39)..(39): Xaa in position 39 is Ile or Met
  Variant (40)..(40): Xaa in position 40 is any amino acid
  Variant (41)..(41): Xaa in position 41 is Ala, Ser or Thr
GEXLXXXXXXXXXXXXXXXXXXXXAXXXXXXSFXSLXXXXX

SEQ ID NO: 1649 - protein, 20 aa, Artificial sequence
  protein pattern
  Variant (2)..(2): Xaa in position 2 is Ala, Gly, Ile or Val
  Variant (3)..(3): Xaa in position 3 is Ala, Ser or Thr
  Variant (4)..(4): Xaa in position 4 is any amino acid
  Variant (6)..(6): Xaa in position 6 is any amino acid
  Variant (7)..(7): Xaa in position 7 is Ala, Pro or Val
  Variant (9)..(9): Xaa in position 9 is any or no amino acid
  Variant (11)..(14): Xaa in position 11 to 14 is any or no amino acid
  Variant (16)..(19): Xaa in position 16 to 19 is any amino acid
  Variant (20)..(20): Xaa in position 20 is Asp, His or Arg
LXXXFXXRXHXXXXRXXXXX

SEQ ID NO: 1650 - DNA, 1464 bp, Arabidopsis thaliana
  CDS (1)..(1464)
atgcaaccttggagaagaaaatttccattgttcgaaacaggagttacaatgaaacagaggaagaacagtaatctctcaatcttcgtcgtagtcttctctgttttcctcttcgggatcttcatgtacaatgaagacgtcaagtccatcgcagagtttcctttctccacctcaaaacctcacgacgtccacgacgaagcgacaccgatcacagagatcacaacactaccggttcaagagtcgatcaagaactcagacccaattcaggaatcgatcaaaaacgcagactcagttcaagattcagttaaagacgtagcagaaccagttcaagaggaggtatcgaaaacagaggaagttaaaaagattgagcttttcgctgcgacggaggatgaagaagacgtggaattgccgccggaggaatgcgatttgttcaccggagaatgggtttttgataacgagacgcatccattgtataaagaggatcaatgtgagttcttgacggcgcaagtcacttgcatgagaaatggaagaagagattctctgtatcagaactggagatggcaacctagagattgttctttaccaaagttcaaagcgaaattgctgttggagaagctaaggaacaagagaatgatgttcgttggagattccctaaaccggaaccaatgggaatcaatggtttgtttggttcaatcagtggttcctcccggtcgaaaaagcttgaacaaaaccggttctctctccgtcttccgagtcgaggattataatgcgacggtggagttttattgggcaccatttttggtggaatcgaattcagatgatccaaatatgcatagtatacttaaccgtataataatgcctgagtccattgaaaagcatggagtcaactggaaaggcgttgactttcttgttttcaacacttacatttggtggatgaacacattcgctatgaaagtcctacgaggatcgttcgataaaggagacaccgagtatgaggagatcgaacggccagtagcgtataggagagtgatgaggacttggggagattgggtggaacgaaatattgatcctctacgtaccactgtcttctttgctagcatgtctcctcttcacatcaagagcttggattgggagaatccagatgggatcaagtgtgcattagagacgacaccaatcctaaacatgtcaatgccattcagcgtaggaacagactacagactgttttcagtagcggaaaacgtcacgcattctcttaatgttccggtttactttctcaacattaccaaactctccgaataccggaaagatgctcacacttcggttcacacaatccgacaaggcaaaatgctgacgccggagcaacaagccgatcccaacacttacgccgattgtatccattggtgtcttcccggtttacctgacacgtggaatgagttcctttacacacgtatcatttcccgttcgtga

SEQ ID NO: 1651 - protein, 487 aa, Arabidopsis thaliana
MQPWRRKFPLFETGVTMKQRKNSNLSIFVVVFSVFLFGIFMYNEDVKSIAEFPFSTSKPHDVHDEATPITEITTLPVQESIKNSDPIQESIKNADSVQDSVKDVAEPVQEEVSKTEEVKKIELFAATEDEEDVELPPEECDLFTGEWVFDNETHPLYKEDQCEFLTAQVTCMRNGRRDSLYQNWRWQPRDCSLPKFKAKLLLEKLRNKRMMFVGDSLNRNQWESMVCLVQSVVPPGRKSLNKTGSLSVFRVEDYNATVEFYWAPFLVESNSDDPNMHSILNRIIMPESIEKHGVNWKGVDFLVFNTYIWWMNTFAMKVLRGSFDKGDTEYEEIERPVAYRRVMRTWGDWVERNIDPLRTTVFFASMSPLHIKSLDWENPDGIKCALETTPILNMSMPFSVGTDYRLFSVAENVTHSLNVPVYFLNITKLSEYRKDAHTSVHTIRQGKMLTPEQQADPNTYADCIHWCLPGLPDTWNEFLYTRIISRS

SEQ ID NO: 1652 - DNA, 1965 bp, Oryza sativa
  CDS (66)..(1634)
gtctctcacgcacgcgcaccgtgcagagcgaagaggagagggggctagctccgggtgccgtcgccatggccaaccggcgcaagttctcgcaggcggggggcggcggcggcggcggggtgttcgacccgttcggcacgaaacaggccgtgtcgtcgctgcggaagggcgggcggctgccggtgtacgtggctggcgtcttcttcgtcatcttcgtcatcatcatgtacggcgaggacatccggtcgctcacgctggacccgatcgcgcgcgcggggacaacgccggcgcggatcgtggagccggtagtgacggaggagcgccacgtcgcccgggtcaaccctcctcggcgcgaggtctcgtccgcggagaaggccgccgcgttgccgctcgacgtcgacgagaggccgaagctggcgacgccgacgccgacggaggcggcgaaggaggtcccgaaggtcgagaagatcaggaagccgaagaaacccaagacgacgaagaagaagccgaggaagccgcggccggcgaagaagacggtggcggcggcagccgggggcctgctcggcgtgccggagacgtgcgacctgtccaagggcgagtgggtgttcgacaacaccagctaccctctgtaccgggaggagcagtgcgagttcctcacgtcgcaggtgacgtgcatgaggaacggccgccgcgacgacacctaccagaagtggcggtggcagcccaaagactgctccatgcccaggttcgacgcgaagctgttcatggagaggctccgagggaagcggttcatgttcgtgggggactcgctgaaccggaaccagtgggagtccatggtgtgcctggtgcagtcggtgatgtcgccggggaagaaatacgtcacctgggaggaccagcgggtcgtcttccacgccgtggagtacaacgcgacggtggagttctactgggcgccgttcctggtggagtccaactccgacgaccccaagatccacagcatccagcaccggatcatcaaggcggacgcgatcgcggcgcacgcacagaactggcgcggcgtcgactacctcgtcttcaacacctacatctggtggatgaacaccctcaacatgaagatcatgagaccgggcgggcagagctgggaggagcatgacgaggtcgtgaggatcgaggcgtatcggaaggtgctgacgacgtgggcgagctgggtgaacgacaacatcgacccggcgcgcacgtccgtcttcttcatgagcatctcccctcttcacatcagcccggaggtgtgggggaacccgggcgggatccggtgcgccaaggagacgatgccgctgctcaactggcacgggccgatctggctgggcacggactgggacatgttccacgcggcggccaacgtgtcccgcacggcggcgacgcgggtgcccatcaccttcgtcgacgtgaccaccatgtcggagcggcgcaaggacgggcacacctccgtgcacaccatccggcagggcaaggtgctgacgccggagcagcaggccgaccctggcacctacgccgactgcatccactggtgcctccccggcgtccctgacatctggaacctcatcctctacaccaggataatgtccaggccgcagctggtatagcaaattccaagaatttacggagaccggattactcataggcagagctggttggttatacacaatcatcgtactgaaaagagatttttcttcttcttttcttcacattcttttctggccgtttcacctgctgtcagaagatgtctttcatttgttctttttcttcaggggttaggttaagtgggaagagatcgatacagtatatggttatatatatggctaatgggatggccatgcttgcgtacgttacgtgcctgcgtgcacagatgcgctgtaaggttcctgaccaaactgtacattggggaagaaaaggattaaagcgaaagagatgaac

SEQ ID NO: 1653 - protein, 522 aa, Oryza sativa
MANRRKFSQAGGGGGGGVFDPFGTKQAVSSLRKGGRLPVYVAGVFFVIFVIIMYGEDIRSLTLDPIARAGTTPARIVEPVVTEERHVARVNPPRREVSSAEKAAALPLDVDERPKLATPTPTEAAKEVPKVEKIRKPKKPKTTKKKPRKPRPAKKTVAAAAGGLLGVPETCDLSKGEWVFDNTSYPLYREEQCEFLTSQVTCMRNGRRDDTYQKWRWQPKDCSMPRFDAKLFMERLRGKRFMFVGDSLNRNQWESMVCLVQSVMSPGKKYVTWEDQRVVFHAVEYNATVEFYWAPFLVESNSDDPKIHSIQHRIIKADAIAAHAQNWRGVDYLVFNTYIWWMNTLNMKIMRPGGQSWEEHDEVVRIEAYRKVLTTWASWVNDNIDPARTSVFFMSISPLHISPEVWGNPGGIRCAKETMPLLNWHGPIWLGTDWDMFHAAANVSRTAATRVPITFVDVTTMSERRKDGHTSVHTIRQGKVLTPEQQADPGTYADCIHWCLPGVPDIWNLILYTRIMSRPQLV

SEQ ID NO: 1654 - DNA, 1708 bp, Glycine max
  CDS (1)..(1389)
atgcagcctcctcgccgcaagaacaataatcttcccaactcagaaacctcaacaacaatgaaaggcaaaaggaacagcagcatcagcatctccattgttgtggtggtgttctccatattcctctttggggtcttcatgtacaacgaggacgttaagtcaatggccgagttcactttcttgaggcctaaggctcaagaaatccaagaagaaacggtttccaacaacaattcaagaactcaaccagagagaaaccgggtcgaggactccgaggaatctcaagaaccgattgatttgaaagccgttgtggcagaagagaagatagtggaagagtatgaggaagaaaatgaagaggttgtgttgcccccagaagagtgtgacttgttcacaggagagtgggtttttgataacttgacacaccctttgtacaaagaagaccaatgcgaattcctcacttcacaagtcacctgcatgaggaatggaagaagtgattctctctatcagaattggagatggcagcccagagattgctctttgcccaaagggaggaggcttatgtttgttggagactcactgaacaggaaccagtgggaatcaatgatttgtctggtccagtctgttgttcctcaaggcaaaaaaagtttgagcaagaatggttctctttctatcttcacaattgaggattacaatgctacggtggagttctactgggcaccgttccttgtggagtcaaactcagatgatccaaagatgcacagcatattgaaccgtattatcatgccggaatcaattgagaagcatgctgtgaattggaagaatgtggactatctgatcttcaacacctacatatggtggatgaatactgccactatgaaagtcttacgagggtcgtttgatgaaggatccacggagtacgatgaagtccctcggccaatagcatatggaagagtcctcaacacatggtctaaatgggtggaagacaacattaatccaaatcgcaccaaagttttcttctccagcatgtctcctcttcatattaagagtgaggcttggaacaatccagatggtataaaatgtgctaaggagaccataccaattctgaatatgtcaacaacattacaagttggcacagatcgtcgactttttgtggttgccaacaatgtgacgcaatcaatgaaggtggtgccagtgaacttccttaacatcacaaccttatcagaatttagaaaagatgcacatacatctgtttacaccatacgccaaggcaaaatgttaactccagaacaacaagctgatcctactacttatgccgattgcattcattggtgtttaccaggattacctgacacttggaatgagttcctctatacaaggatcatctctcaatcttgacctacaacaaacaacctatagatatcttcacacatacttttattctcttttccctctttccttaattgttattatttctccttttacttatgaagaatgctcttttttcattgattgcctcaacatttgtttcaatttttgtaatttagtcattttttattggcttttttttttttttaggaattgggcatttttccctttttttcctttgttaagccaatttagccaagcacggaagcacagcaagatccttaaatgtacaatgaatcttttctccttgaatgaagagaaaataaagaacaaaggttttgtttaaaaa

SEQ ID NO: 1655 - protein, 462 aa, Glycine max
MQPPRRKNNNLPNSETSTTMKGKRNSSISISIVVVVFSIFLFGVFMYNEDVKSMAEFTFLRPKAQEIQEETVSNNNSRTQPERNRVEDSEESQEPIDLKAVVAEEKIVEEYEEENEEVVLPPEECDLFTGEWVFDNLTHPLYKEDQCEFLTSQVTCMRNGRSDSLYQNWRWQPRDCSLPKGRRLMFVGDSLNRNQWESMICLVQSVVPQGKKSLSKNGSLSIFTIEDYNATVEFYWAPFLVESNSDDPKMHSILNRIIMPESIEKHAVNWKNVDYLIFNTYIWWMNTATMKVLRGSFDEGSTEYDEVPRPIAYGRVLNTWSKWVEDNINPNRTKVFFSSMSPLHIKSEAWNNPDGIKCAKETIPILNMSTTLQVGTDRRLFVVANNVTQSMKVVPVNFLNITTLSEFRKDAHTSVYTIRQGKMLTPEQQADPTTYADCIHWCLPGLPDTWNEFLYTRIISQS

SEQ ID NO: 1656 - DNA, 2107 bp, Zea mays
  CDS (208)..(1797)
attgggtacctcgaggccggccggggaagaagctgccggcctgccgctgcctgctcgcagttgccagcccccgccgccgcggaggacggaaggaagcgaatcaaccgcgactgtctccgacgggaataaagcaggcgaggccagccggtcgcggaacccccaattctcagctgcggccggcgatcgagtcggttccgtcccgcgccgatgcggatcccgcggcggaagggcggggccgggccgctcgctgtcggggtgcccagcaggcgggcgcaggtcgccgcggtcttcgcgctcgccgcactgctgggggtctccgtgctctacgacaacgcccacatcgccgcctcgctgcggaggcacggcggcccgaggacgtacgccaagctctcctccttcgaaggcgccaccgctgtccccagcatcgccaaggaagaggcggcggcggcggtggcgcgggcaacggagtcggtgccggtgcacggcgcggatcgggccgactcgcccccgcacgagcggcaggaggagatcgaggagcgcgcatcgaagcctggagcgacggccgggagctccctgcaggacgcgccgctaatcgaggaggtggtgcaaggaggaagcggaggccacgacggcgacggcgacggcgacggcggcgcgcaggcgcaggagcagcccccggccccggggacctgcgacctgtacaagggccgctgggtgtacgacgagtcccgcgcgccgctgtacaaggagtccgactgcagcttcctcacggagcaggtcacctgtatgcgcaacggccgacgcgacgacgactatcagaagtggcgctggcagcccgacggctgcgatctccccagatttgaagctaagttgcttctggagaagctaaggaacaaaaggctgatgtttgtgggggattccctgaataggaaccagtgggagtccatggtgtgcctggtccagtcagaggctccatgggacaaaaagtcccttgtcaagaatggttctcttaatgtgttccatcttcaggagtacaatgcaacggttgagttctattggtctcctttcctagtggagtcgaactcagatgacccagacattcatagcatcagtgaccgcatgatcaagccgacatcgatcgctaagcatgcggcgaactgggaaggggtggactacctgatcttcaacacttacatctggtggatgaacacgccacagatgaaaactctgcacggtggatctttttcgaggaaacatgtcaagtatgacgaaatcgaacgtgtggaggcgtaccggaaggtcctcaagacatggtctagatgggtagaggcgcacgtagatcccaagagaacaacggtcttattcatgagcgtgtcaccagtacatatgcagagcgaaggttggggcagccccaacgccgtaaaatgcttctccgagacacagccggcgatcagctacaataagaaactggaggtgggcacggactgggacctcttcgcgaccgcccagcgcgtgacgaggtcgatgaagaaggtacccgtgcacttcgtcaacataactgcgctgtcggagatccgcaaggacgcgcacacctccgtgcacacgctgcggcaggggaagctcctgacgccggagcagaaggcgaacccgaggaagttcgcggactgcatccactggtgcctccccggtgtgccggacacgtggaacgagtttgtttatggccatatcgtgtcgagcaccccgccgccgcagcagcagcagcagcagaagataaccgaggatgaacctcacagatgacggctagaaaatacttcacatggtagcgcaattttagtgagagaagaagatttgtgatcgaggccataagttattttttttgtctgttctaggtttagaagcctatgctatgctgctggttcacctaagcatttgttggaaggtaacaccaagcagccgtgaacagccacggtcacctgaggagccttctcgcagtgtctggatgtggttgtttgagcctctgaggggaaatgccctgcgcgcttctgtgctaaaaaaaaaaaaaaaaaaggcccctagcacataattttaccagaatccgattgtttct

SEQ ID NO: 1657 - protein, 529 aa, Zea mays
MRIPRRKGGAGPLAVGVPSRRAQVAAVFALAALLGVSVLYDNAHIAASLRRHGGPRTYAKLSSFEGATAVPSIAKEEAAAAVARATESVPVHGADRADSPPHERQEEIEERASKPGATAGSSLQDAPLIEEVVQGGSGGHDGDGDGDGGAQAQEQPPAPGTCDLYKGRWVYDESRAPLYKESDCSFLTEQVTCMRNGRRDDDYQKWRWQPDGCDLPRFEAKLLLEKLRNKRLMFVGDSLNRNQWESMVCLVQSEAPWDKKSLVKNGSLNVFHLQEYNATVEFYWSPFLVESNSDDPDIHSISDRMIKPTSIAKHAANWEGVDYLIFNTYIWWMNTPQMKTLHGGSFSRKHVKYDEIERVEAYRKVLKTWSRWVEAHVDPKRTTVLFMSVSPVHMQSEGWGSPNAVKCFSETQPAISYNKKLEVGTDWDLFATAQRVTRSMKKVPVHFVNITALSEIRKDAHTSVHTLRQGKLLTPEQKANPRKFADCIHWCLPGVPDTWNEFVYGHIVSSTPPPQQQQQQKITEDEPHR

SEQ ID NO: 1658 - DNA, 2536 bp, Zea mays
  CDS (557)..(2278)
cggttcatttcgaaaaaggtataagaagccgccatgacctccaagatcactgactacttcaccattagaccctgctggttagaagctcattagtactacatacattgactcattaaactaacgttagtaagcatgactgcagctatctctgaaggcagtcaaaatagatgtttatgagtttttctcaagggctgggaaggctaaagtaacttgtctctgtttggtcattatgctctaggatccttcaacttgacatcacagcaatcgttgaggaggaggaggacacctggaactcgattctttcctgtgccgccactgatggcatcctttatttgcgtcaaggatttccctcaagatttatgcatgcatgcgtggcacaaatttctttgctctcctaagtgggttggtgctgcaacaatcacgcgtgtagagacatctggtggttgatggtttagtggcttatccatgaaaaaggaaagtggaagagggagccatgaatatatatagggtagtgagactgctcactggtgcttcagagacttattaggaccccagcatgccaatatacgtagatccatttgtgaaagtttcagcaaccggaaaaaagagcacgtcatcacaacgctttcagtggagagctactacagtaccccgccgaaccgacgccgacagctgccgcctgccggacccaacaagaaggaaccaagcctacaaaatcacaactccacgttcgtcgccgcgggaggatcgggctgggctggcctcgcctcggttggcttcagctgccacctgccgcgcggccactatccagcctccttcggtccttccccttccccagcagcaggctccggccgcagccatgcccaagccaccgccgcccacctccgacccctcgctccccaccaccaccaccacctcgacccccaagtcgtcgtcccgccctgcccccgcggggctcctcgatccgctcgccgcctccgggcgctccctcctcgcctcggcgcggcgctccccggtcaccacgctcgccggcgccttcttcctcctcgcgctcgtcatgtacggagaggacgcccgcaccatcgccgagctctccatcgacgactacctctacccggacgccgatctctacaacgtctccggcctgccgccccttgcgttgcccccgcctacctgcgacctctccagtggccgctgggtcttcgacaacgcctccgtcccggcgtacagggagaaagactgcaccttcctcaccaagcaggtcacctgcctcgccaacggccgccccgacgatatgtggcagtactggagatggcagcccagtgactgctccctccccacgttcgacgcccggagattcatggaggcgatgcgcgggaagcggctcatgttcgtgggggactcgctgaaccgcaaccagtgggagtcgctggtgtgcctggtgcagcccatcctgtccaagggcaggaagaagatcgtcaagcggggctccctcaacaccttctacgccaaggagtaccgcgccacgctcgagttctactgggcgcccttcctcgtcgagtccaactctgacaaccccaacttccacagcatcaaggaacggatcatcagtcccgagcggatcgaggcgcacgccaagcactggaaggacgttgactacctcatcttcaacacctacatctggtggatgaacaccgccgacatcaaagtcaggagacccaactcgaggtactggtctgagaacgacgaggttcccaggattgaggcgtatggtcgggtgttcaagacgtggtctgattggctcaatgacaacatcgatcctgcccgcacgtccgtcttcttcatgacgatttctcctcttcacatcagcccacagaattggggaaacccggacgggatcaaatgtgtaagagagacgcttccatatcagaactacagccaacccctggatctttaccatgacatgcggttgtatgacctagtgatcaaggttgccagctccatggagaaggtcccggtgtcagtgatcaatatcacaaagatgtcagattaccggaaggacgcccacgcgtccgtgtacaccatccggcaagggaaactgctgacgccaaagcagaaggcagacccagagaaattcgcggactgcatccattggtgccttcccggcgtgccggacgtgtggaaccaaatactctacacgaggattctttcaaaatcaccatggcgttctaattttagtccccctccgtcccagtccacacctcttcctccccaatgattggagaatgtaggattatcctttttgttttactttttaggttagattgagtataggttagcggagaaaggaaaatggatgtgctgattactgatggtatgtaagaaggttcagctgaagtgtaagttagttgtgagtcagccaattcaggaaacaacagcgatctagtacaaggtgcaccatggatatgatactatactatacaccaagtatatgccactgcgttgctatggaatcattatatctatatgttcctac

SEQ ID NO: 1659 - protein, 573 aa, Zea mays
MPIYVDPFVKVSATGKKSTSSQRFQWRATTVPRRTDADSCRLPDPTRRNQAYKITTPRSSPREDRAGLASPRLASAATCRAATIQPPSVLPLPQQQAPAAAMPKPPPPTSDPSLPTTTTTSTPKSSSRPAPAGLLDPLAASGRSLLASARRSPVTTLAGAFFLLALVMYGEDARTIAELSIDDYLYPDADLYNVSGLPPLALPPPTCDLSSGRWVFDNASVPAYREKDCTFLTKQVTCLANGRPDDMWQYWRWQPSDCSLPTFDARRFMEAMRGKRLMFVGDSLNRNQWESLVCLVQPILSKGRKKIVKRGSLNTFYAKEYRATLEFYWAPFLVESNSDNPNFHSIKERIISPERIEAHAKHWKDVDYLIFNTYIWWMNTADIKVRRPNSRYWSENDEVPRIEAYGRVFKTWSDWLNDNIDPARTSVFFMTISPLHISPQNWGNPDGIKCVRETLPYQNYSQPLDLYHDMRLYDLVIKVASSMEKVPVSVINITKMSDYRKDAHASVYTIRQGKLLTPKQKADPEKFADCIHWCLPGVPDVWNQILYTRILSKSPWRSNFSPPPSQSTPLPPQ

SEQ ID NO: 1660 - DNA, 1804 bp, Zea mays subsp. mays
  CDS (132)..(1568)
aattcgggctgggcttgttggcctcgcctcggttggtgccctctctgccgccgcggaggagagtcgccgccaccaccaccatccagccagccaaggcttcccttccccagcagcagtctccagccgcagccatggccaagccaccgccgcccacctccacctccgaccccgcgctccccaccactgctacaaccacctcgtcggcccccaagtcgtcgtctcgcccctccccccgcccccggggcctcctcgatccgctcgcagcctccgcgcgctccctcctcgcctcggcgcgccgctccccggtcaccacgctagccgccgccttcttcctcctcgcgctcgtcatgtacggcgaggacgcccgcaccatcgccgagctctccatcgacgactacctctacccggacgccgacctctacaacgtctccggcctgccgcccctcgcgctgcccccgctcacctgcgacctctcccgcggcagatgggtcttcgacaacgtctccgttccggcgtaccgggagaaagactgcaccttcctcaccaagcaggtctcctgcctcgccaacggccgccccgacgacatgtggcagtactggagatggcagcccaacgagtgctccctccccacgttcgacgctcggagattcatggaggcgatgcgcgggaagcggctcatgttcgtgggggactcgctgaaccgcaaccagtgggagtcgctggtgtgcctcgtgcagcccatcctgtctaagggcaggaagaagatcgtcaagcggggctccttcaacaccttctacgctaaggagtaccgcgccacgctcgagttctactgggcgcccttcctcgtcgaatccaactctgacaaccccaacttccacagcatcaaggaacggatcatcagtcccgagcggatcgaggcgcacgccaagcactggaaggatgctgactacctcatcttcaacacctacatctggtggatgaacaacgccgacatcaaagtcaggagacccaattcgaggtactggtctgacaacgatgaggttcccaggattgaggcgtatggccgtgtgttcaagacatggtctgattggctcaatgacaacatcgatcctgcccgaacgtccgtcttcttcatgacgatttctcctcctcacctcagcccacagaattggggaaacccggacggtatcaaatgtgtaagagagacgcttccatatcagaactacagccaacacctggatctttaccatgacatgcggctgtatgacttagtggtcaatgtggccagctccatggagaaggtcccagtgacagtgatcaatatcacaaggatgtcagattaccggaaggacgcccacacgtccctgtacaccatccggcaagggaagctgctgacgcctaagcagaaggcagaccccgagaagttcgcggattgcatccactggtgccttcctggcgtgccggacgtgtggaaccaaatactctacacgaggattctttcgaaatcatcgtggcattctaattttagcccccctccatcccagtctctgcctcttcctccccaatgagaatcagaagtgggggcttggtttttgtcggagaatgtatgatttttcattctttttccttcctttttgggtagattgagtaaaatgatagcacgaaaaggaaaatgaatgttctgattactgatggtatagcatgtaagaagattcagctgaagtgtaaattagttgtgagttagccaattgagaaaacaacagcgacctagtataaagtgcatatacatatactgctggttcac

SEQ ID NO: 1661 - protein, 478 aa, Zea mays subsp. mays
MAKPPPPTSTSDPALPTTATTTSSAPKSSSRPSPRPRGLLDPLAASARSLLASARRSPVTTLAAAFFLLALVMYGEDARTIAELSIDDYLYPDADLYNVSGLPPLALPPLTCDLSRGRWVFDNVSVPAYREKDCTFLTKQVSCLANGRPDDMWQYWRWQPNECSLPTFDARRFMEAMRGKRLMFVGDSLNRNQWESLVCLVQPILSKGRKKIVKRGSFNTFYAKEYRATLEFYWAPFLVESNSDNPNFHSIKERIISPERIEAHAKHWKDADYLIFNTYIWWMNNADIKVRRPNSRYWSDNDEVPRIEAYGRVFKTWSDWLNDNIDPARTSVFFMTISPPHLSPQNWGNPDGIKCVRETLPYQNYSQHLDLYHDMRLYDLVVNVASSMEKVPVTVINITRMSDYRKDAHTSLYTIRQGKLLTPKQKADPEKFADCIHWCLPGVPDVWNQILYTRILSKSSWHSNFSPPPSQSLPLPPQ

SEQ ID NO: 1662 - DNA, 1804 bp, Zea mays subsp. mays; identical to SEQ ID NO: 1660
  CDS (348)..(1568)

SEQ ID NO: 1663 - protein, 406 aa, Zea mays subsp. mays
MYGEDARTIAELSIDDYLYPDADLYNVSGLPPLALPPLTCDLSRGRWVFDNVSVPAYREKDCTFLTKQVSCLANGRPDDMWQYWRWQPNECSLPTFDARRFMEAMRGKRLMFVGDSLNRNQWESLVCLVQPILSKGRKKIVKRGSFNTFYAKEYRATLEFYWAPFLVESNSDNPNFHSIKERIISPERIEAHAKHWKDADYLIFNTYIWWMNNADIKVRRPNSRYWSDNDEVPRIEAYGRVFKTWSDWLNDNIDPARTSVFFMTISPPHLSPQNWGNPDGIKCVRETLPYQNYSQHLDLYHDMRLYDLVVNVASSMEKVPVTVINITRMSDYRKDAHTSLYTIRQGKLLTPKQKADPEKFADCIHWCLPGVPDVWNQILYTRILSKSSWHSNFSPPPSQSLPLPPQ

SEQ ID NO: 1664 - DNA, 1539 bp, Glycine max
  CDS (1)..(1539)
atgcagcctcttcgaagaaaaactcctctattcacctcagaaatggggacaatgaagggtcgcaagaacaacaacctctccatcttcgtggtggtgttctccatcttcctctttgggctcttcatgtacaacgaggatgttaagtccattgctgaattcccattctcgagtcccaaagcgcatgagacacaagaaggaggagaacctaataaacatgttgattctgttcaagacagtgttgttgttcaaagggagagtgagaagaaggatgtggaagacactgtcacagtaaaaatttcttctaagaggagtacttcaagggctcagctagagaagagtggtgctgaggatgaggattctgatgagcgtgttgatttgaaaactgttgtggagaaagagaagaagattgaaatgccacgtgcggaggaagaggaagaggtggaagaagaagaagaagatgagaaagttgagttgccaccagaagattgtgacttgttcactggggagtgggttttggataacgtgacacaccctttgtacaaagaagacaagtgtgagtttctcacttcgcaagtgacatgcatgaagaatggacgacctgattctttgtatcagaattggaagtggaagccaagagattgttctctgccaaagttcaaaccgaagcttttgtttcagaagattagagggaagaggcttatgtttgttggagattcactgaataggaaccagtgggaatccatggtttgtatggtcaattctgcggttccttcacataacaagacctggtacaagactggttctcttgccatcttcaaaatcgaggagccggagcacgttaccacggtggaattctattgggcaccattccttgtagagtcaaattcagatgatccaaacatgcacagcatattaaaccgtataatcatgcctgaatcaatagaaaaacatggagtgaattggaaggatgtggactacttgatctttaacacctacatatggtggatgaacactttctctatgaaagtcctacgagggtcatttgatgaaggatccacggaatatgatgaagttcctcggccaatagcatatgggagagtcattaacacatggtcaaaatggatagatgacaacattgacccaaatcgaaccaaagttttcttcagcagcacgtcccctcttcatatcaagagtgagaattggaacaacccaaatggtataaaatgtgccaaggagatcactccggttctcaacatgtcaaccccattggatgtagggacagatcgtcgcctttttacaattgccaacaatgtgactcagtcaatgaaggtgccagtgtacttcattaacatcacttctttgtcagaattgagaaaagatgcacacacttctgtttacaccatacgccaaggcaaaatgctaactccagaacaacaagctgatcctactacttatgccgattgcatccattggtgtttaccaggattacctgacacttggaacgagttcctctatacaaggatcatctctcaatcttga

SEQ ID NO: 1665 - protein, 512 aa, Glycine max
MQPLRRKTPLFTSEMGTMKGRKNNNLSIFVVVFSIFLFGLFMYNEDVKSIAEFPFSSPKAHETQEGGEPNKHVDSVQDSVVVQRESEKKDVEDTVTVKISSKRSTSRAQLEKSGAEDEDSDERVDLKTVVEKEKKIEMPRAEEEEEVEEEEEDEKVELPPEDCDLFTGEWVLDNVTHPLYKEDKCEFLTSQVTCMKNGRPDSLYQNWKWKPRDCSLPKFKPKLLFQKIRGKRLMFVGDSLNRNQWESMVCMVNSAVPSHNKTWYKTGSLAIFKIEEPEHVTTVEFYWAPFLVESNSDDPNMHSILNRIIMPESIEKHGVNWKDVDYLIFNTYIWWMNTFSMKVLRGSFDEGSTEYDEVPRPIAYGRVINTWSKWIDDNIDPNRTKVFFSSTSPLHIKSENWNNPNGIKCAKEITPVLNMSTPLDVGTDRRLFTIANNVTQSMKVPVYFINITSLSELRKDAHTSVYTIRQGKMLTPEQQADPTTYADCIHWCLPGLPDTWNEFLYTRIISQS

SEQ ID NO: 1666 - DNA, 1380 bp, Glycine max
  CDS (1)..(1380)
atgcagcctcttcgaagaaaaactcctctattcaccacctcagaaatgggggcaatgaagggtcgcaagaacaacaacctctccatcttcgtggtggtgttctccatattcctctttgggctcttcatgtacaacgaggacgttaagtcaatggccgagttcactttcttgaggcctaaggctcaagaaatccaagaagaaacggtttccaacaacaattcaagaactcaaccagagagaaaccgggtcgaggactccgaggaatctcaagaaccgattgatttgaaagccgttgtggcagaagagaagatagtggaagagtatgaggaagaaaatgaagaggttgtgttgcccccagaagagtgtgacttgttcacaggagagtgggtttttgataacttgacacaccctttgtacaaagaagaccaatgcgaattcctcacttcacaagtcacctgcatgaggaatggaagaagtgattctctctatcagaattggagatggcagcccagagattgctctttgcccaaagggaggaggcttatgtttgttggagactcactgaacaggaaccagtgggaatcaatgatttgtctggtccagtctgttgttcctcaacgaaaaaaaagtttgagcaacaatggttctctttctatcttcacaattgaggattacaatgctacggtggagttctactgggcaccgttccttgaggagtcaaactcagatgatccaaagatgcacagcatattgaaccgaattatcatgccggaatcaattgagaagcatgctgtgaattggaagaatgtggactatctgatcttcaacacctacatatggtggatgaatactgacactatgaaagtcttacgagggtcgtttgatgaaggatccacggagtacgatgaagtccctcggccaatagcatatggaagagtcctcaacacatggtctaaatgggtggaagacaacattaatccaaatcgcaccaaagttttcttctccagcatgtctcctcttcatattaagagtgaggcttggaacaatccagatggtataaaatgtgctaaggagaccataccaattctgaatatgtcaacaacattacaagttggcacagatcgtcgactgtttgtggttgccaacaatgtgacgcaatcaatgaaggtggtgccagtgaacttccttaacatcacaaccttatcagaatttagaaaagatgcacatacatctgtttacaccatacgccaaggcaaaatgttaactccagaacaacaagctgatcctactacttatgccgattgcattcattggtgtttaccaggattacctgacacttggaatgagttcctctatacaaggatcatctctcaatcttga

SEQ ID NO: 1667 - protein, 459 aa, Glycine max
MQPLRRKTPLFTTSEMGAMKGRKNNNLSIFVVVFSIFLFGLFMYNEDVKSMAEFTFLRPKAQEIQEETVSNNNSRTQPERNRVEDSEESQEPIDLKAVVAEEKIVEEYEEENEEVVLPPEECDLFTGEWVFDNLTHPLYKEDQCEFLTSQVTCMRNGRSDSLYQNWRWQPRDCSLPKGRRLMFVGDSLNRNQWESMICLVQSVVPQRKKSLSNNGSLSIFTIEDYNATVEFYWAPFLEESNSDDPKMHSILNRIIMPESIEKHAVNWKNVDYLIFNTYIWWMNTDTMKVLRGSFDEGSTEYDEVPRPIAYGRVLNTWSKWVEDNINPNRTKVFFSSMSPLHIKSEAWNNPDGIKCAKETIPILNMSTTLQVGTDRRLFVVANNVTQSMKVVPVNFLNITTLSEFRKDAHTSVYTIRQGKMLTPEQQADPTTYADCIHWCLPGLPDTWNEFLYTRIISQS

SEQ ID NO: 1668 - DNA, 1275 bp, Arabidopsis thaliana
  CDS (1)..(1275)
atgcaaccttcaagaacaagagtttcattttttgaaacaggagagaccatgaagcaaagaaagaagagttatctctcaatcttcgtgatcttcttctctcttttcttcttcgggatcttcatgtacaatgacaacctcaaatcctccattgctgacttcacatcttcgaacccattctctagttcatttgtggagttgccgccggatgagtgtgatctgttcaccggtcaatgggttttcgacaacaagacatatccattgtataaagaagaagagtgtgagttcttgacggagcaagtgacttgtttaagaaacggaaggaaagattctttgtttcagaattggagatggcaacctagagactgttctttaccaaaattcaatgcaagagtgttgttagagaagctgaggaacaagagattgatgtttgtcggtgactcgttaaaccggaaccaatgggaatcaatggtttgtttggttcaatcagtgattcctcccggtagaaaaagcttaaaccagaccggttcactcactgttttcaaaatccaggactataacgcgacggtggagttttattgggcgccatttttggtggaatcaaattcagacgatccggaaaagcacagtataatcgaccgtataataatgccagagtccatcgagaagcatggagtcaactggataggcgttgactttcttgtcttcaatagttacatctggtggatgaatactgtctccatcaaagtcctacgtggatcgttcgatgatggggacacagagtatgatgagatcaaacggccaatagcgtacgagagggtgttgaggacattgggagattgggtggaccataacattgatcctctaagtacaactgttttcttcatgagcatgtctcctcttcacatcaagagctcagattgggctaatcctgagggtataaggtgtgctttagagacaacaccgatcttgaacatgtctttcaacgtggcttacgggcagttttccgcggtggggacggattacaggctgtttccggtggcggaaaacgttacacagtctctaaaagttcctattcatttcctcaacattactgcattgtctgagtatcgtaaagatgcacatacttcggtttacacgatcaagcaaggcaagttgctgacgcgggagcagcaaaacgatccagccaattttgctgattgcatacactggtgcttaccaggccttcctgatacatggaatgagtttctctatacacatattatttctcgaagatga

SEQ ID NO: 1669 - protein, 424 aa, Arabidopsis thaliana
MQPSRTRVSFFETGETMKQRKKSYLSIFVIFFSLFFFGIFMYNDNLKSSIADFTSSNPFSSSFVELPPDECDLFTGQWVFDNKTYPLYKEEECEFLTEQVTCLRNGRKDSLFQNWRWQPRDCSLPKFNARVLLEKLRNKRLMFVGDSLNRNQWESMVCLVQSVIPPGRKSLNQTGSLTVFKIQDYNATVEFYWAPFLVESNSDDPEKHSIIDRIIMPESIEKHGVNWIGVDFLVFNSYIWWMNTVSIKVLRGSFDDGDTEYDEIKRPIAYERVLRTLGDWVDHNIDPLSTTVFFMSMSPLHIKSSDWANPEGIRCALETTPILNMSFNVAYGQFSAVGTDYRLFPVAENVTQSLKVPIHFLNITALSEYRKDAHTSVYTIKQGKLLTREQQNDPANFADCIHWCLPGLPDTWNEFLYTHIISRR

SEQ ID NO: 1670 - DNA, 1356 bp, Arabidopsis thaliana
  CDS (1)..(1356)
atgacaacggcgttgttttcaccgtctaaccgtagaaaacgccgtctcacacacttcttcttcaccgtactcgctttcatcttactcgccgccttcatctacggccacgatttcatctctttctctcgtcgatctcttcactctccgacgatcgtccaccaatccgcaatcgtcgttgtagttgacgaacctcctccgcctccaccaacatctcctcctccgccttctcctccaccaccgtctcctccaccaccatctcctccaccgccatctcctccgccacctgcttttgcagtaggtaaaacgccggaaggatgcgatgtcttcaaagggaattgggtcaaagactggtcaacgcgtccactttacagagaatccgagtgtccgtacattcagccgcagctcacttgccgcacgcatggccgtcccgatagtgattatcagtcatggagatggcgacctgattcctgctcacttccttcgtttaatgcgacggtgatgttggagagcttaagagggaagaagatgatgttcgttggagattcgttgaacagaggaatgtatgtttctctcatctgtcttcttcattcacaaatcccagagaactccaaatccatggatactttcggatcactcaccgtcttctctctcaaggattacaatgcaacgattgagttctattgggcaccgtttcttctagaatcgaattcagataacgcaacagttcatagagtatcagatcgaattgtgaggaaaggatcgatcaacaaacacggtaggcattggcgaggggctgatatagttgtgttcaacacatacttgtggtggaggactggcttcaaaatgaagatcttggaaggttctttcaaggatgagaagaagagaatcgttgagatggagagtgaagatgcttatagaatggcgttgaagactatggttaaatgggtgaagaagaatatggatccattgaagacgagggttttctttgctaccatgtctcctactcattacaagggcgaggattggggaggcgaacaaggaaaaaattgttacaatcaaacgacaccgatccaagacatgaaccattggccatcagactgcagcaaaaccttaatgaaagtgataggagaggaattagaccaaagagcagagtttccggtgacggtacttaacattacacaactctctggctatcggaaagacgcgcacacgtcaatctacaagaagcaatggagcccattgacgaaggagcagctagcaaatccggctagctactcagactgtatacattggtgcttgcctggtcttcaagatacttggaacgagcttttctttgccaagttattttatccatga

SEQ ID NO: 1671 - protein, 451 aa, Arabidopsis thaliana
MTTALFSPSNRRKRRLTHFFFTVLAFILLAAFIYGHDFISFSRRSLHSPTIVHQSAIVVVVDEPPPPPPTSPPPPSPPPPSPPPPSPPPPSPPPPAFAVGKTPEGCDVFKGNWVKDWSTRPLYRESECPYIQPQLTCRTHGRPDSDYQSWRWRPDSCSLPSFNATVMLESLRGKKMMFVGDSLNRGMYVSLICLLHSQIPENSKSMDTFGSLTVFSLKDYNATIEFYWAPFLLESNSDNATVHRVSDRIVRKGSINKHGRHWRGADIVVFNTYLWWRTGFKMKILEGSFKDEKKRIVEMESEDAYRMALKTMVKWVKKNMDPLKTRVFFATMSPTHYKGEDWGGEQGKNCYNQTTPIQDMNHWPSDCSKTLMKVIGEELDQRAEFPVTVLNITQLSGYRKDAHTSIYKKQWSPLTKEQLANPASYSDCIHWCLPGLQDTWNELFFAKLFYP

SEQ ID NO: 1672 - DNA, 1284 bp, Arabidopsis thaliana
  CDS (1)..(1284)
atgaagcaaactgacggcagagaaaggaaagcttacctttctctgctatactttgcagtcattcttcttcccgtattccttctcggatgctatctgtacaacgagaagcagctgagggttggccagtttcaggaattcaatacacataacctgcaagaacacatcactccactacaacaaagcaaagaagataaagacaagaagactgatcttgttccattagaattctgtgatgttttcacaggaaaatgggttcttgataacgtcacacatcctttatacaaagaagatgaatgtgagtttctatcagagtgggtggcttgtacaagaaacgggaggccagactctaagtaccagaaatggagatggcaacctcaagattgctctttgccaaggttcgacagtaagctgctgctagagaaactcaggggaaagaaactaatgttcattggtgattcaatacattacaatcagtggcaatccatggtttgtatggttcaatccgtgattccctcaggcaaaaagaccttaaaacacacagcacaaatgtccatcttcaacatagaggagtacaatgcaaccatatcattttactgggcacctttcctagtcgaatcaaatgctgatcctccagacaagagagacgggaagaccgatccagtaatcattcctaattcaatctcgaaacacggcgagaactggaaagacgcagactacctcatattcaacacctacatatggtggactagacattccacgatcaaagttctaaaacaagaatctttcaacaaaggagactcaaaagagtacaatgaaatcggaatctatatagtatacaaacaagtgttatcaacatggacaaaatggctagaacaaaacatcaacccaagtcaaacatctatcttcttcagcagcatgtcaccaactcatatcagaagttcagattggggattcaatgaaggaagcaaatgtgaaaaagagacagaaccaatactaaacatgtcaaaaccaataaatgttggaacaaatcgaagactttacgaaatcgcactgaatgcgaccaaatctacaaaagtgccgattcatttcctcaacataacgactatgtcagagtatagaaaagatgggcatacctcattttacggttcgataaatgggaaactcatgacgccggagcagaagttagatccgagaacttttgctgattgttatcattggtgtcttccgggattgcctgattcatggaacgagttgctctctctgtatatcatctacaaaatttaa

SEQ ID NO: 1673 - protein, 427 aa, Arabidopsis thaliana
MKQTDGRERKAYLSLLYFAVILLPVFLLGCYLYNEKQLRVGQFQEFNTHNLQEHITPLQQSKEDKDKKTDLVPLEFCDVFTGKWVLDNVTHPLYKEDECEFLSEWVACTRNGRPDSKYQKWRWQPQDCSLPRFDSKLLLEKLRGKKLMFIGDSIHYNQWQSMVCMVQSVIPSGKKTLKHTAQMSIFNIEEYNATISFYWAPFLVESNADPPDKRDGKTDPVIIPNSISKHGENWKDADYLIFNTYIWWTRHSTIKVLKQESFNKGDSKEYNEIGIYIVYKQVLSTWTKWLEQNINPSQTSIFFSSMSPTHIRSSDWGFNEGSKCEKETEPILNMSKPINVGTNRRLYEIALNATKSTKVPIHFLNITTMSEYRKDGHTSFYGSINGKLMTPEQKLDPRTFADCYHWCLPGLPDSWNELLSLYIIYKI

SEQ ID NO: 1674 - DNA, 1527 bp, Oryza sativa (japonica cultivar-group)
  CDS (1)..(1527)
atgcagatgcagcagcggcggaagccaccgcctgcggcggcgccggtggccgccaagcagccttccccgcgcaggacgcccgggcctctctccttcgccggcgccctgctctccctcctcgtcgtcgccaccttcctctacatcaacgaccacggcaacatgatgccaccccacgcgtcccccgaccccgacctccgcctcctgcaggaggccgcgcaccaaaaggtcaactccatcctcctctcccgccacgcccctgcccctcccccgcgcaccaacaccaacacgtcttcatccgaccaacacctccgcctcatcaacatccccatgtcctccgacttggacttggagttggggggtaacagcacaagcagcagcggcgtggagattcaatttgagcagcagcagcagcaggaggagaagaatctgagagggtgcgagctatacaaggggcggtgggtgtacgacgcggcggggagggaggcgccgctgtacagggagtcggagtgcgggttcctgacggagcaggtgacgtgcatgcgcaacggccggcgggacgactcgtaccagcggtggcggtggcagccggaggggtgcgacctcccaagcttcgacgccagggcgctgctggagcggctgcggaacaagcggatgatgttcgtcggtgactcgctcaaccgcaaccagtgggagtccatggtatgcctcgtccagtcagcaattccctatggccaaaagacgctcaccaagttcgtcaacaacggatcgctcaacgtcttccgagcgcacgagtacaacgcgacggtggagttctactgggcgccgttcctggtacagtccaactcggacgacccgcaggtgcacagcgtacgtgacagggtcatcgcgtggcgctccatcgcaaagcacgccgccaactggaagggcgtccactacctcgtcttcaatacctacatctggtggctcaacaacttccagatcaaagtgctgaaaagcagaggtgctccgtttgcgggcagcggggggtggagcagccggtacgcgctggtagaccgagcgatcgcctacagggaggtgctaaagacgtgggccaagtgggtggacaggcgtatcgaccccaacaaaacccatgtcttcttcatggccatgtctcccaaccacttcatgccggaggcttgggggggatcggcgggggcggtgaagtgcgcgatggagacgcagccgatcgtgaaccggacatcaggggggctggacatcgggacggactggaggctgcacggggtggcgcgcggtgtgctgcggtcgatgcggcgggtgggcgtgcgattcgtggacatcacggcgctgtcggagcttcgcaaggacgcgcacacgtcggtgcacacgctgcggcagggcaagctgctgaccccggagcagcaggccgaccctcgcacctacgccgactgcatccactggtgcctccctggcctccccgacacctggaaccacttcctctacgcccacatcgtcgcccatgccgcctag

SEQ ID NO: 1675 - protein, 508 aa, Oryza sativa (japonica cultivar-group)
MQMQQRRKPPPAAAPVAAKQPSPRRTPGPLSFAGALLSLLVVATFLYINDHGNMMPPHASPDPDLRLLQEAAHQKVNSILLSRHAPAPPPRTNTNTSSSDQHLRLINIPMSSDLDLELGGNSTSSSGVEIQFEQQQQQEEKNLRGCELYKGRWVYDAAGREAPLYRESECGFLTEQVTCMRNGRRDDSYQRWRWQPEGCDLPSFDARALLERLRNKRMMFVGDSLNRNQWESMVCLVQSAIPYGQKTLTKFVNNGSLNVFRAHEYNATVEFYWAPFLVQSNSDDPQVHSVRDRVIAWRSIAKHAANWKGVHYLVFNTYIWWLNNFQIKVLKSRGAPFAGSGGWSSRYALVDRAIAYREVLKTWAKWVDRRIDPNKTHVFFMAMSPNHFMPEAWGGSAGAVKCAMETQPIVNRTSGGLDIGTDWRLHGVARGVLRSMRRVGVRFVDITALSELRKDAHTSVHTLRQGKLLTPEQQADPRTYADCIHWCLPGLPDTWNHFLYAHIVAHAA

SEQ ID NO: 1676 - DNA, 1569 bp, Oryza sativa (japonica cultivar-group)
  CDS (1)..(1569)
atggccaaccggcgcaagttctcgcaggcggggggcggcggcggcggcggggtgttcgacccgttcggcacgaaacaggccgtgtcgtcgctgcggaagggcgggcggctgccggtgtacgtggctggcgtcttcttcgtcatcttcgtcatcatcatgtacggcgaggacatccggtcgctcacgctggacccgatcgcgcgcgcggggacaacgccggcgcggatcgtggagccggtagtgacggaggagcgccacgtcgcccgggtcaaccctcctcggcgcgaggtctcgtccgcggagaaggccgccgcgttgccgctcgacgtcgacgagaggccgaagctggcgacgccgacgccgacggaggcggcgaaggaggtcccgaaggtcgagaagatcaggaagccgaagaaacccaagacgacgaagaagaagccgaggaagccgcggccggcgaagaagacggtggcggcggcagccgggggcctgctcggcgtgccggagacgtgcgacctgtccaagggcgagtgggtgttcgacaacaccagctaccctctgtaccgggaggagcagtgcgagttcctcacgtcgcaggtgacgtgcatgaggaacggccgccgcgacgacacctaccagaagtggcggtggcagcccaaagactgctccatgcccaggttcgacgcgaagctgttcatggagaggctccgagggaagcggttcatgttcgtgggggactcgctgaaccggaaccagtgggagtccatggtgtgcctggtgcagtcggcgatgtcgccggggaagaaatacgtcacctgggaggaccagcgggtcgtcttccacgccgtggagtacaacgcgacggtggagttctactgggcgccgttcctggtggagtccaactccgacgaccccaagatccacagcatccagcaccggatcatcaaggcggacgcgatcgcggcgcacgcacagaactggcgcggcgtcgactacctcgtcttcaacacctacatctggtggatgaacaccctcaacatgaagatcatgagaccgggcgggcagagctgggaggagcatgacgaggtcgtgaggatcgaggcgtatcggaaggtgctgacgacgtgggcgagctgggtgaacgacaacatcgacccggcgcgcacgtccgtcttcttcatgagcatctcccctcttcacatcagcccggaggtgtgggggaacccgggcgggatccggtgcgccaaggagacgatgccgctgctcaactggcacgggccgatctggctgggcacggactgggacatgttccacgcggcggccaacgtgtcccgcacggcggcgacgcgggtgcccatcaccttcgtcgacgtgaccaccatgtcggagcggcgcaaggacgggcacacctccgtgcacaccatccggcagggcaaggtgctgacgccggagcagcaggccgaccctggcacctacgccgactgcatccactggtgcctccccggcgtccctgacatctggaacctcatcctctacaccaggataatgtccaggccgcagctggtatag

SEQ ID NO: 1677 - protein, 522 aa, Oryza sativa (japonica cultivar-group)
MANRRKFSQAGGGGGGGVFDPFGTKQAVSSLRKGGRLPVYVAGVFFVIFVIIMYGEDIRSLTLDPIARAGTTPARIVEPVVTEERHVARVNPPRREVSSAEKAAALPLDVDERPKLATPTPTEAAKEVPKVEKIRKPKKPKTTKKKPRKPRPAKKTVAAAAGGLLGVPETCDLSKGEWVFDNTSYPLYREEQCEFLTSQVTCMRNGRRDDTYQKWRWQPKDCSMPRFDAKLFMERLRGKRFMFVGDSLNRNQWESMVCLVQSAMSPGKKYVTWEDQRVVFHAVEYNATVEFYWAPFLVESNSDDPKIHSIQHRIIKADAIAAHAQNWRGVDYLVFNTYIWWMNTLNMKIMRPGGQSWEEHDEVVRIEAYRKVLTTWASWVNDNIDPARTSVFFMSISPLHISPEVWGNPGGIRCAKETMPLLNWHGPIWLGTDWDMFHAAANVSRTAATRVPITFVDVTTMSERRKDGHTSVHTIRQGKVLTPEQQADPGTYADCIHWCLPGVPDIWNLILYTRIMSRPQLV

SEQ ID NO: 1678 - DNA, 1626 bp, Oryza sativa
  CDS (50)..(1417)
ggcgggtgagcctcaggaaaggaagggggcgagtccggccgccgtcgccatgtccaagccacagcagcagtcgcccccttccaccaccaccacctcacctcctccaccaccgccctccactccgccccccgcctcctcctcccgctccctcctctccgcgctgcgccgctccccggtcaccaccctcgtcgccgccttcttcctcctcgccctcttcatgtacggcgaggacgtccgcaccctcgccgagctctccatcgacgactacctctaccccgacgccgatttctacaacgtctccgcccttccccctctcctcctccccccgcccacctgcgacctctcccgcggccgatgggtattcgacaacacctccctcccggcctacagggagaaggaatgcaccttcctcaccaagcaggtctcctgcctcgccaatggccgccccgacgacctatggcagtactggcgctggcaacccaacaactgctcgctccccacgttcgacgcgcggcggttcatggagaagatgcgggggaagaggatgatgttcgtgggggactcgctgaatcggaaccagtgggagtcgctggtgtgcctggtgcagcccatcctatccaagggcaggaagaagatcgtcaagcgcggttccttcaacatcttctacgccaaggagtatcgcgccaccctcgagttctactgggctccattcctcgtcgagtccaactccgacaaccccaatttccaccacatcgaccagcgcatcatcagccctgagcggatcgagagccatgccaacaactggaaggacgttgattacctcatcttcaacacctacatctggtggatgaacaacgaagacatcaaagtcaggaggccaaattcaacttcttggtcagatcacgacgaggtgccaaggatcgagacctatggccgtgtgttcaagacttggtcgacctggctggaacagaatgttgatcctgccaggacttcggtgttcttcatgacaatttctcctcttcacaacagcccagcacaatgggggaacccgaacgggatcaaatgcgtaaaggagacacttccagtcctcaactacaccaagccactggatctcaaccatgacatgcggatgtacgacctggtagcaaaagttgctaaaaacatgaagaatgttccagtgtcgttgatcgacatcacaaggatgtcagattacaggaaggatgcccacacatcattgtattccatccgtcagggtaaactgttgacaccggagcagaaggctgacccacagaagtacgctgactgcatccattggtgccttcctggggtaccagacgtctggaaccagatactctacaccaggatcctctccaaatcctcccctccatccacacatccctctctccctccacaatgacaagcagggagcatgatttttttttttgccccatcgtatactatataggaaatgtatcattactattcaatttttttggtagtttggtgaagaaaatcaagctagagagagaaaggatggagtgggctgtttactggtggcatgtaaaatcgttcaattgaattgtaaattagttttgagctaaccaattgagcaaacagcactgttgt

SEQ ID NO: 1679 - protein, 455 aa, Oryza sativa
MSKPQQQSPPSTTTTSPPPPPPSTPPPASSSRSLLSALRRSPVTTLVAAFFLLALFMYGEDVRTLAELSIDDYLYPDADFYNVSALPPLLLPPPTCDLSRGRWVFDNTSLPAYREKECTFLTKQVSCLANGRPDDLWQYWRWQPNNCSLPTFDARRFMEKMRGKRMMFVGDSLNRNQWESLVCLVQPILSKGRKKIVKRGSFNIFYAKEYRATLEFYWAPFLVESNSDNPNFHHIDQRIISPERIESHANNWKDVDYLIFNTYIWWMNNEDIKVRRPNSTSWSDHDEVPRIETYGRVFKTWSTWLEQNVDPARTSVFFMTISPLHNSPAQWGNPNGIKCVKETLPVLNYTKPLDLNHDMRMYDLVAKVAKNMKNVPVSLIDITRMSDYRKDAHTSLYSIRQGKLLTPEQKADPQKYADCIHWCLPGVPDVWNQILYTRILSKSSPPSTHPSLPPQ

SEQ ID NO: 1680 - DNA, 1554 bp, Oryza sativa
  CDS (1)..(1554)
atgcggatcccgcggaggaagggcggggcggggccgctggtgggggcgccgagcaggagggcgcaggtggcggcggtgttcgcgctcgcgctgctgctcggtgtctccgtgctctacgacagcgcccacatcgccgcctcgctccgccgccacggcgtcggcggcggcgggagtagcggcggcggaggaggaggaggaggagacggcgcccgcgcctacacaaacaccaagctctccgccacgacggaggaggcggaggcggaggcggccgaggtgcgctccccaccggcgcagggggtcgaatcggcggtggaggcgacggatcggggcgaggctccaccggagcagccggtggccgcggactccggagcgtcgtcagccgagaccccgccgtctctgctggagcaggtgacggagacgccgccgccgtcgccgtcgtcgtcgtcggcggcggcggcggcggcggaggcgcaggtgggaggggatcacggtggcgagagctgcgacgtgtacaaggggaggtgggtgtacgacgaggcgaacgcgccgctgtacaaggagtccgcctgcgagttcctcaccgagcaggtcacctgcatgcgcaacggccgccgcgacgacgactaccagaaatggcggtggcagcccgacggctgcgacctccccagatttgacgctaagttgctcctggagaaactgaggaacaaacgactgatgtttgtgggggattcgctgaatcggaaccaatgggagtccatggtgtgccttgtccaatctgaggctccctgggagaagaaatcacttgtcaagaatgactctctaaatgtcttccgccttgaggagtacaatgctactatcgagttctattggtcaccttttctagttgagtcaaactcagatgatccaaacatgcatagcatcgttgaccgcataatcaagccaacatcaattgcaaaacatgcagcgaattgggaaggggtggactacttgattttcaacacttatatttggtggatgaatacaccagagatgaaaattttacatggtgggtccttttcaaagaaaccagtgaaatacgatgaaatggaacgtgtagctgcataccggaaggtcctcaagacatggtctagatgggtagaaaagcatgtagatccgaaaagaagtacagtcttcttcatgagtgtctcacctgtgcatatgcagagcgagggctggggaaaaccagatgccataaaatgcttctctgagacgcagccagctatcaattacacaaagaaattggaggtgggcacggactgggatctgttctcgacagctcatcacgtaacgaaggctatgaagagggtgccagtgcacttcatcaacataacggcgttgtcagagatccgcaaggacgcgcacacatcgaaggcgaacccccgcaagttcgcggactgcatccactggtgcctacctgggttgccagacacatggaacgagttcatttacggtcacatcgtctcgagccctcaaaggaggccggttgagccgattgagaatcaacctcagagataa

SEQ ID NO: 1681 - protein, 517 aa, Oryza sativa
MRIPRRKGGAGPLVGAPSRRAQVAAVFALALLLGVSVLYDSAHIAASLRRHGVGGGGSSGGGGGGGGDGARAYTNTKLSATTEEAEAEAAEVRSPPAQGVESAVEATDRGEAPPEQPVAADSGASSAETPPSLLEQVTETPPPSPSSSSAAAAAAEAQVGGDHGGESCDVYKGRWVYDEANAPLYKESACEFLTEQVTCMRNGRRDDDYQKWRWQPDGCDLPRFDAKLLLEKLRNKRLMFVGDSLNRNQWESMVCLVQSEAPWEKKSLVKNDSLNVFRLEEYNATIEFYWSPFLVESNSDDPNMHSIVDRIIKPTSIAKHAANWEGVDYLIFNTYIWWMNTPEMKILHGGSFSKKPVKYDEMERVAAYRKVLKTWSRWVEKHVDPKRSTVFFMSVSPVHMQSEGWGKPDAIKCFSETQPAINYTKKLEVGTDWDLFSTAHHVTKAMKRVPVHFINITALSEIRKDAHTSKANPRKFADCIHWCLPGLPDTWNEFIYGHIVSSPQRRPVEPIENQPQR

SEQ ID NO: 1682 - DNA, 1350 bp, Arabidopsis thaliana
  CDS (49)..(1275)
atgcaaccttcaagaacaagagtttcattttttgaaacaggagagaccatgaagcaaagaaagaagagttatctctcaatcttcgtgatcttcttctctcttttcttcttcgggatcttcatgtacaatgacaacctcaaatcctccattgctgacttcacatcttcgaacccattctctagttcatttgtggagttgccgccggatgagtgtgatctgttcaccggtcaatgggttttcgacaacaagacatatccattgtataaagaagaagagtgtgagttcttgacggagcaagtgacttgtttaagaaacggaaggaaagattctttgtttcagaattggagatggcaacctagggactgttctttaccaaaattcaatgcaagagtgttgttagagaagctgaggaacaagagattgatgtttgtcggtgactcgttaaaccggaaccaatgggaatcaatggtttgtttggttcaatcagtgattcctcccggtagaaaaagcttaaaccagaccggttcactcactgttttcaaaatccaggactataacgcgacggtggagttttattgggcgccatttttggtggaatcaaattcagacgatccggaaaagcacagtataatcgaccgtataataatgccagagtccatcgagaagcatggagtcaactggataggcgttgactttcttgtcttcaatagttacatctggtggatgaatactgtctccatcaaagtcctacgtggatcgttcgatgatggggacacagagtatgatgagatcaaacggccaatagcgtacgagagggtgttgaggacattgggagattgggtggaccataacattgatcctctaagtacaactgttttcttcatgagcatgtctcctcttcacatcaagagctcagattgggctaatcctgagggtataaggtgtgctttagagacaacaccgatcttgaacatgtctttcaacgtggcttacgggcagttttccgcggtggggacggattacaggctgtttccggtggcggaaaacgttacacagtctctaaaagttcctattcatttcctcaacattactgcattgtctgagtatcgtaaagatgcacatacttcggtttacacgatcaagcaaggcaagttgctgacgcgggagcagcaaaacgatccagccaattttgctgattgcatacactggtgcttaccaggccttcctgatacatggaatgagtttctctatacacatattatttctcgaagatgagattctttcatcctcttttttggtttaaaaaaattcttgtgatgtatataggacagagattcaagggatttgaag

SEQ ID NO: 1683 - protein, 408 aa, Arabidopsis thaliana
MKQRKKSYLSIFVIFFSLFFFGIFMYNDNLKSSIADFTSSNPFSSSFVELPPDECDLFTGQWVFDNKTYPLYKEEECEFLTEQVTCLRNGRKDSLFQNWRWQPRDCSLPKFNARVLLEKLRNKRLMFVGDSLNRNQWESMVCLVQSVIPPGRKSLNQTGSLTVFKIQDYNATVEFYWAPFLVESNSDDPEKHSIIDRIIMPESIEKHGVNWIGVDFLVFNSYIWWMNTVSIKVLRGSFDDGDTEYDEIKRPIAYERVLRTLGDWVDHNIDPLSTTVFFMSMSPLHIKSSDWANPEGIRCALETTPILNMSFNVAYGQFSAVGTDYRLFPVAENVTQSLKVPIHFLNITALSEYRKDAHTSVYTIKQGKLLTREQQNDPANFADCIHWCLPGLPDTWNEFLYTHIISRR

SEQ ID NO: 1684 - DNA, 1590 bp, Zea mays
  CDS (1)..(1590)
atgcagcaccggcgcaagcccgcttccgccgcggcgccgccggccgccaagcagccggccgcgcgcaggcccacggcgcggctgtcgctcgcgggcctcgtcgtctccatcttcctcgtcgccaccttcctgtacaacgaggacgtggtgaaggcggcctccggctcctccagctcagcaacaacagccgacgccgctgaggtaggcgtctccgggcgggcgaggtcacccgacctaagggtgctgcaggaggcggcgcaccagggggtggaagctgaggagcgggaggttggagatcgtacggaagcggagcagaagcagaagcccctgaccctccccatccccatccccgtggtggcgctggcggaggaggaactcgtggagaatactaagggaaggcagaagcagcagcagcaggaggaggagcaaacccagaagccaccgccaccgccgccgcctcctccccaggttgccgggtgcgacctgtaccggggtcggtggacgttcgacgcggccggcgagcaggcgccgctgtaccgcgagtcggagtgcgagttcctgacggagcaggtgacgtgcatgcgcaacggccgccgcgacgactcgtaccagaagtggcggtggcagcccgatggatgcgacctgcccaggtacgatgctcggttgctgcttgagcggctgcgcaacaagcggctcatgttcgtgggtgactcgctgaaccgcaaccagtgggagtccatggtgtgcctggtgcagtctgtggtgccctggggccacaagacgctgcacaagttcgtcaacaacggatcgctcaacgtgttcacggcgcatgattacaacgccaccgtggagttctactgggcgcccttcctggtggagtccaactcggatgacccgcaggcgcacagcgtcatgaaccgtgtcatcgcctggcgcgccatcgccaagcacgccaagaactggaagggcgtggactacctcgtcttcaactcatacatctggtggctcaacacattcgagatgaaagtcattcgccgtcatcagcatcagcttgaaaaggaggaggagggggtgaggtggagcaagtacgcccttgtggaccggccggtggcgtaccgggaggtgctcaagacgtgggccaggtgggtggaccgccacatcgaccccaaccgaacaagagtcttcttcatgggcatgtcgcccaaccacgtcacgccgtgggcgtggggtaacgacggcggcatcaagtgcgccatggagacgcagcccatcagcaacaaccggacggggcgactggacatcggcacggattggcgcctgcacggcgtggcgcgcggggtgctggcgcgctacctccgccgcgtgccggtgcacttcgtcgacatcacggggctgtcggagctgcgcaaggacgcgcacacctccgtgcacacgctgcggcaggggaagctgctcacaccggagcagcaggccgaccccaagacctacgccgactgcatccactggtgcctcccgggactccccgacacctggaaccacttcctctacgcgcacatcctctcgctctcctcgtccgcccaggatcactaa

SEQ ID NO: 1685 - protein, 529 aa, Zea mays
MQHRRKPASAAAPPAAKQPAARRPTARLSLAGLVVSIFLVATFLYNEDVVKAASGSSSSATTADAAEVGVSGRARSPDLRVLQEAAHQGVEAEEREVGDRTEAEQKQKPLTLPIPIPVVALAEEELVENTKGRQKQQQQEEEQTQKPPPPPPPPPQVAGCDLYRGRWTFDAAGEQAPLYRESECEFLTEQVTCMRNGRRDDSYQKWRWQPDGCDLPRYDARLLLERLRNKRLMFVGDSLNRNQWESMVCLVQSVVPWGHKTLHKFVNNGSLNVFTAHDYNATVEFYWAPFLVESNSDDPQAHSVMNRVIAWRAIAKHAKNWKGVDYLVFNSYIWWLNTFEMKVIRRHQHQLEKEEEGVRWSKYALVDRPVAYREVLKTWARWVDRHIDPNRTRVFFMGMSPNHVTPWAWGNDGGIKCAMETQPISNNRTGRLDIGTDWRLHGVARGVLARYLRRVPVHFVDITGLSELRKDAHTSVHTLRQGKLLTPEQQADPKTYADCIHWCLPGLPDTWNHFLYAHILSLSSSAQDH

SEQ ID NO: 1686 - DNA, 1545 bp, Zea mays
  CDS (1)..(1545)
atgcggatcccgcggcggaagggcggggccgggccgctcgctgtcggggtgcccagcaggcgggcacaggtggccgcggtcttcgcgctcgccacgctgctgggggtctccgtgctctacgacgccgcccacatcgccgcctcgctgcggaggcacggcggcccgacggcgtacgccaagctctcctcctccgacggcgccgcctccgtctccggcgtcgcgagggaggaggtggcggccgtagagacgctcgcgccgccggcgagggcagtggggtctgacggcgcggatcggaccgacccgcccccgcacgagcagcaggaggaggccgaggagggcgcggcgaagcccggtgcctccctgcagcaggacgcgccgctgaccgaggaggtggtggaagggggaagcgggggccacggcggcggcggctcgcaggagcaggagcaggatcaggcccaggggacctgcgacctgtacaagggccgctgggtgtacgacgagtcccgcgcgccgctgtacaaggagtccgagtgcagcttcctcacggagcaggtcacctgcacgcgcaacggccgccgcgacgacgactaccagaagtggcgctggcagcccgacggctgcgacctccccagatttgaggctaagttgcttctggagaagctaaggaacaaaaggctgatgtttgtgggtgattctctgaatcggaaccagtgggagtccatggtgtgcctggtccagtcagaggcaccatgggacaaaaaatctctcgtcaagaatggttctcttaatgtcttccatcttcaggagtacaatgcaacagttgagttctactgggctccgttcctagtggagtcaaactcagacgacccagacattcacagcatcagcgaccgcatgatcaagccgacatcgatcgcgaagcatgcggcaaactgggaaggcgtggactacctgatcttcaacacttacatttggtggatgaacacaccgcagatgaaaaccgtgcacggtggatctttctcaaggaaacacgtaaagtacgatgaaatagagcgtgtggaggcataccggaaggtcctcaagacgtggtccagatgggtagaggcgcacattgatcccaagagaagcacggtcctattcatgagcgtgtcaccggtacatatgcagagtgaaggctggggcagccccaacgccgtaaaatgcttctccgagacgcagccggcgatcaactacacgaagaaactggaggtgggcacggactgggacctcttcgcggccgcccagcgcgtgacgaggtcgatggagaaggtgccggtgcgcttcgtcgacgtgaccgcgctgtcggagatccgcaaggacgcgcacacctccgtgcacacgctgcggcaggggaagctcctgacgcccgagcagaaggcgaacccgaggaagttcgcggattgcatccactggtgcctccccggcgtgccggacacgtggaaccagttcgtttatggtcacatcgtgtcgagcccgccgccgccgcaggatcaacctcacagataa

SEQ ID NO: 1687 - protein, 514 aa, Zea mays
MRIPRRKGGAGPLAVGVPSRRAQVAAVFALATLLGVSVLYDAAHIAASLRRHGGPTAYAKLSSSDGAASVSGVAREEVAAVETLAPPARAVGSDGADRTDPPPHEQQEEAEEGAAKPGASLQQDAPLTEEVVEGGSGGHGGGGSQEQEQDQAQGTCDLYKGRWVYDESRAPLYKESECSFLTEQVTCTRNGRRDDDYQKWRWQPDGCDLPRFEAKLLLEKLRNKRLMFVGDSLNRNQWESMVCLVQSEAPWDKKSLVKNGSLNVFHLQEYNATVEFYWAPFLVESNSDDPDIHSISDRMIKPTSIAKHAANWEGVDYLIFNTYIWWMNTPQMKTVHGGSFSRKHVKYDEIERVEAYRKVLKTWSRWVEAHIDPKRSTVLFMSVSPVHMQSEGWGSPNAVKCFSETQPAINYTKKLEVGTDWDLFAAAQRVTRSMEKVPVRFVDVTALSEIRKDAHTSVHTLRQGKLLTPEQKANPRKFADCIHWCLPGVPDTWNQFVYGHIVSSPPPPQDQPHR

SEQ ID NO: 1688 - DNA, 1464 bp, Hordeum vulgare
  CDS (1)..(1464)
atgcggatcccgcggcggaaggccggggcggcgctcggcgtgcccagccgccgggcgcagatcgccgccgtcttcgcgctcgccgtgctgctcggcgtctccgtcctctacgacagcgcccacatcgccgcctcgctgcgtcgccacagcggatacaacaggccctccgccaccacggagccggcggcgggggctggcccgcgtgctacgccggcgcaggcggtggaatctgcggggccggccgtggatcggaccgacccgcccccgcggctcggggcggaggaggcgtccaagtctaaccccgggacggcggcggacgggtccgagccggagacgcgggtcctgaaggaggtggtggcgcaagggggggagcccacctgcgacatgtacaaggggaggtgggtgcacgaccaggagaacgcgccgctctacaaggagtccgactgcgagttcctcacggagcaggtcacctgcatgcgcaacggccgccgcagcgacgagtaccagaagtggcggtggcagcctgatgcctgcgacctcccaaggtttgaggctaagttgcttcttgagaagctaaggaacaaaagaatgatgtttgttggggattcactgaaccggaaccagtgggagtccatggtgtgcctggttcagtctgtggctccatgggataagaaaaagcttgtcaagaatggatctctaaatgtgttccgccttatggagtacaatgcaacaattgagttctattgggctcctttcctagttgagtcgaactcagatgatccagacatccatagcatcacggaccgaatgatcacgccaacatcgatcgccaagcatgcagcaaactggataggggtggactatttgatcttcaacacttacatttggtggatgaacaccccaaagatgaaaattgtgcctgacgggtccttcacaaagaaaccggttaagtacgatgaattggatcgtgtggttgcataccgacagatcctcgagacatggtctggatgggtagaagagaatgtagaccccaaaagaacaatggtcttattcatgagtgtgtcaccagtacatatgcagagtgaaggctggggcagccctaacaacataaaatgcttttctgagacacaaccagcactaaattactctaaaccattggatgtcggcactgactgggatcttttcacggaatctcatgaagtgacgaaggcgatgaagaaggtacccgtgcacttcatcaacataaccgcattgtcggagatccgcaaggacgcacacacatctgtgcacactctgcggcagggtaagctcctgacgaaggagcagcaggccaacccacgcaagttcgccgactgcatccactggtgtctccctggcttgccggacacatggaatgagttcatttacggccacattgtgtcgagccctatacagcggcagattgagaatcaatctgaaagatga

SEQ ID NO: 1689 - protein, 487 aa, Hordeum vulgare
MRIPRRKAGAALGVPSRRAQIAAVFALAVLLGVSVLYDSAHIAASLRRHSGYNRPSATTEPAAGAGPRATPAQAVESAGPAVDRTDPPPRLGAEEASKSNPGTAADGSEPETRVLKEVVAQGGEPTCDMYKGRWVHDQENAPLYKESDCEFLTEQVTCMRNGRRSDEYQKWRWQPDACDLPRFEAKLLLEKLRNKRMMFVGDSLNRNQWESMVCLVQSVAPWDKKKLVKNGSLNVFRLMEYNATIEFYWAPFLVESNSDDPDIHSITDRMITPTSIAKHAANWIGVDYLIFNTYIWWMNTPKMKIVPDGSFTKKPVKYDELDRVVAYRQILETWSGWVEENVDPKRTMVLFMSVSPVHMQSEGWGSPNNIKCFSETQPALNYSKPLDVGTDWDLFTESHEVTKAMKKVPVHFINITALSEIRKDAHTSVHTLRQGKLLTKEQQANPRKFADCIHWCLPGLPDTWNEFIYGHIVSSPIQRQIENQSER

SEQ ID NO: 1690 - DNA, 1590 bp, Zea mays
  CDS (1)..(1590)
atgcggatcccgcggcggaagggcggggccgggccgctcgctgtcggggtgcccagcaggcgggcgcaggtcgccgcggtcttcgcgctcgccgcactgctgggggtctccgtgctctacgacaacgcccacatcgccgcctcgctgcggaggcacggcggcccgaggacgtacgccaagctctcctccttcgaaggcgccaccgctgtccccagcatcgccaaggaagaggcggcggcggcggtggcgcgggcaacggagtcggtgccggtgcacggcgcggatcgggccgactcgcccccgcacgagcggcaggaggagatcgaggagcgcgcatcgaagcctggagcgacggccgggagctccctgcaggacgcgccgctaatcgaggaggtggtgcaaggaggaagcggaggccacgacggcgacggcgacggcgacggcggcgcgcaggcgcaggagcagcccccggccccggggacctgcgacctgtacaagggccgctgggtgtacgacgagtcccgcgcgccgctgtacaaggagtccgactgcagcttcctcacggagcaggtcacctgtatgcgcaacggccgacgcgacgacgactatcagaagtggcgctggcagcccgacggctgcgatctccccagatttgaagctaagttgcttctggagaagctaaggaacaaaaggctgatgtttgtgggggattccctgaatcggaaccagtgggagtccatggtgtgcctggtccagtcagaggctccatgggacaaaaagtcccttgtcaagaatggttctcttaatgtgttccatcttcaggagtacaatgcaacggttgagttctattggtctcctttcctagtggagtcgaactcagatgacccagacattcatagcatcagtgaccgcatgatcaagccgacatcgatcgctaagcatgcggcgaactgggaaggggtggactacctgatcttcaacacttacatctggtggatgaacacgccacagatgaaaactctgcacggtggatctttttcgaggaaacatgtcaagtatgacgaaatcgaacgtgtggaggcgtaccggaaggtcctcaagacatggtctagatgggtagaggcgcacgtagatcccaagagaacaacggtcttattcatgagcgtgtcaccagtacatatgcagagcgaaggttggggcagccccaacgccgtaaaatgcttctccgagacacagccggcgatcagctacaataagaaactggaggtgggcacggactgggacctcttcgcgaccgcccagcgcgtgacgaggtcgatgaagaaggtacccgtgcacttcgtcaacataactgcgctgtcggagatccgcaaggacgcgcacacctccgtgcacacgctgcggcaggggaagctcctgacgccggagcagaaggcgaacccgaggaagttcgcggactgcatccactggtgcctccccggtgtgccggacacgtggaacgagtttgtttatggccatatcgtgtcgagcaccccgccgccgcagcagcagcagcagcagaagataaccgaggatgaacctcacagatga

SEQ ID NO: 1691 - protein, 529 aa, Zea mays; identical to SEQ ID NO: 1657

SEQ ID NO: 1692 - DNA, 1590 bp, Zea mays
  CDS (1)..(1590)
atgcggatcccgcggcggaagggcggggccgggccgctcgctgtcggggtgcccagcaggcgggcgcaggtcgccgcggtcttcgcgctcgccgcactgctgggggtctccgtgctctacgacaacgcccacatcgccgcctcgctgcggaggcacggcggcccgaggacgtacgccaagctctcctccttcgaaggcgccaccgctgtccccagcatcgccaaggaagaggcggcggcggcggtggcgcgggcaacggagtcggtgccggtgcacggcgcggatcgggccgactcgcccccgcacgagcggcaggaggagatcgaggagcgcgcatcgaagcctggagcgacggccgggagctccctgcaggacgcgccgctaatcgaggaggtggtgcaaggaggaagcggaggccacgacggcgacggcgacggcgacggcggcgcgcaggcgcaggagcagcccccggccccggggacctgcgacctgtacaagggccgctgggtgtacgacgagtcccgcgcgccgctgtacaaggagtccgactgcagcttcctcacggagcaggtcacctgtatgcgcaacggccgacgcgacgacgactatcagaagtggcgctggcagcccgacggctgcgatctccccagatttgaagctaagttgcttctggagaagctaaggaacaaaaggctgatgtttgtgggggattccctgaataggaaccagtgggagtccatggtgtgcctggtccagtcagaggctccatgggacaaaaagtcccttgtcaagaatggttctcttaatgtgttccatcttcaggagtacaatgcaacggttgagttctattggtctcctttcctagtggagtcgaactcagatgacccagacattcatagcatcagtgaccgcatgatcaagccgacatcgatcgctaagcatgcggcgaactgggaaggggtggactacctgatcttcaacacttacatctggtggatgaacacgccacagatgaaaactctgcacggtggatctttttcgaggaaacatgtcaagtatgacgaaatcgaacgtgtggaggcgtaccggaaggtcctcaagacatggtctagatgggtagaggcgcacgtagatcccaagagaacaacggtcttattcatgagcgtgtcaccagtacatatgcagagcgaaggttggggcagccccaacgccgtaaaatgcttctccgagacacagccggcgatcagctacaataagaaactggaggtgggcacggactgggacctcttcgcgaccgcccagcgcgtgacgaggtcgatgaagaaggtacccgtgcacttcgtcaacataactgcgctgtcggagatccgcaaggacgcgcacacctccgtgcacacgctgcggcaggggaagctcctgacgccggagcagaaggcgaacccgaggaagttcgcggactgcatccactggtgcctccccggtgtgccggacacgtggaacgagtttgtttatggccatatcgtgtcgagcaccccgccgccgcagcagcagcagcagcagaagataaccgaggatgaacctcacagatga

SEQ ID NO: 1693 - protein, 529 aa, Zea mays; identical to SEQ ID NO: 1657

SEQ ID NO: 1694 - DNA, 27 bp, Artificial sequence
  primer
atagagctcgaaacagaggaagaacag

SEQ ID NO: 1695 - DNA, 32 bp, Artificial sequence
  primer
atacccgggtcctctgttttcgatacctcctc

SEQ ID NO: 1696 - DNA, 25 bp, Artificial sequence
  primer
atgcaaccttggagaagaaaatttc

SEQ ID NO: 1697 - DNA, 21 bp, Artificial sequence
  primer
tcacgaacgggaaatgatacg

SEQ ID NO: 1698 - DNA, 27 bp, Artificial sequence
  primer
ataccatgggaaacagaggaagaacag

SEQ ID NO: 1699 - DNA, 34 bp, Artificial sequence
  primer
atattaattaatcctctgttttcgatacctcctc

SEQ ID NO: 1700 - DNA, 27 bp, Artificial sequence
  primer
ataggtaccgaaacagaggaagaacag

SEQ ID NO: 1701 - DNA, 32 bp, Artificial sequence
  primer
atagtcgactcctctgttttcgatacctcctc

SEQ ID NO: 1702 - protein, 371 aa, Artificial sequence
  consensus sequence
  Variant (4)..(5): Xaa in position 4 to 5 is any amino acid
  Variant (7)..(7): Xaa in position 7 is any amino acid
  Variant (10)..(10): Xaa in position 10 is any amino acid
  Variant (12)..(15): Xaa in position 12 to 15 is any amino acid
  Variant (16)..(17): Xaa in position 16 to 17 is any or no amino acid
  Variant (21)..(21): Xaa in position 21 is any amino acid
  Variant (23)..(24): Xaa in position 23 to 24 is any amino acid
  Variant (26)..(26): Xaa in position 26 is any amino acid
  Variant (30)..(30): Xaa in position 30 is any amino acid
  Variant (35)..(36): Xaa in position 35 to 36 is any amino acid
  Variant (40)..(40): Xaa in position 40 is any amino acid
  Variant (42)..(44): Xaa in position 42 to 44 is any amino acid
  Variant (46)..(46): Xaa in position 46 is any amino acid
  Variant (52)..(53): Xaa in position 52 to 53 is any amino acid
  Variant (55)..(55): Xaa in position 55 is any amino acid
  Variant (58)..(58): Xaa in position 58 is any amino acid
  Variant (60)..(60): Xaa in position 60 is any amino acid
  Variant (62)..(65): Xaa in position 62 to 65 is any amino acid
  Variant (67)..(68): Xaa in position 67 to 68 is any amino acid
  Variant (70)..(70): Xaa in position 70 is any amino acid
  Variant (73)..(73): Xaa in position 73 is any amino acid
  Variant (88)..(88): Xaa in position 88 is any amino acid
  Variant (95)..(100): Xaa in position 95 to 100 is any amino acid
  Variant (102)..(106): Xaa in position 102 to 106 is any amino acid
  Variant (107)..(109): Xaa in position 107 to 109 is any or no amino acid
  Variant (112)..(114): Xaa in position 112 to 114 is any amino acid
  Variant (116)..(119): Xaa in position 116 to 119 is any amino acid
  Variant (120)..(121): Xaa in position 120 to 121 is any or no amino acid
  Variant (123)..(123): Xaa in position 123 is any amino acid
  Variant (126)..(126): Xaa in position 126 is any amino acid
  Variant (141)..(141): Xaa in position 141 is any amino acid
  Variant (143)..(144): Xaa in position 143 to 144 is any amino acid
  Variant (145)..(145): Xaa in position 145 is any or no amino acid
  Variant (149)..(150): Xaa in position 149 to 150 is any amino acid
  Variant (152)..(152): Xaa in position 152 is any amino acid
  Variant (154)..(157): Xaa in position 154 to 157 is any amino acid
  Variant (159)..(160): Xaa in position 159 to 160 is any amino acid
  Variant (162)..(163): Xaa in position 162 to 163 is any amino acid
  Variant (166)..(167): Xaa in position 166 to 167 is any amino acid
  Variant (172)..(172): Xaa in position 172 is any amino acid
  Variant (182)..(185): Xaa in position 182 to 185 is any amino acid
  Variant (187)..(199): Xaa in position 187 to 199 is any amino acid
  Variant (200)..(208): Xaa in position 200 to 208 is any or no amino acid
  Variant (210)..(211): Xaa in position 210 to 211 is any amino acid
  Variant (213)..(214): Xaa in position 213 to 214 is any amino acid
  Variant (217)..(218): Xaa in position 217 to 218 is any amino acid
  Variant (220)..(221): Xaa in position 220 to 221 is any amino acid
  Variant (224)..(225): Xaa in position 224 to 225 is any amino acid
  Variant (227)..(231): Xaa in position 227 to 231 is any amino acid
  Variant (234)..(235): Xaa in position 234 to 235 is any amino acid
  Variant (237)..(237): Xaa in position 237 is any amino acid
  Variant (239)..(239): Xaa in position 239 is any amino acid
  Variant (241)..(243): Xaa in position 241 to 243 is any amino acid
  Variant (246)..(246): Xaa in position 246 is any amino acid
  Variant (248)..(252): Xaa in position 248 to 252 is any amino acid
  Variant (254)..(255): Xaa in position 254 to 255 is any amino acid
  Variant (256)..(256): Xaa in position 256 is any or no amino acid
  Variant (258)..(261): Xaa in position 258 to 261 is any amino acid
  Variant (263)..(264): Xaa in position 263 to 264 is any amino acid
  Variant (267)..(267): Xaa in position 267 is any amino acid
  Variant (269)..(270): Xaa in position 269 to 270 is any amino acid
  Variant (272)..(280): Xaa in position 272 to 280 is any amino acid
  Variant (281)..(286): Xaa in position 281 to 286 is any or no amino acid
  Variant (288)..(289): Xaa in position 288 to 289 is any amino acid
  Variant (291)..(296): Xaa in position 291 to 296 is any amino acid
  Variant (298)..(302): Xaa in position 298 to 302 is any amino acid
  Variant (303)..(304): Xaa in position 303 to 304 is any or no amino acid
  Variant (307)..(311): Xaa in position 307 to 311 is any amino acid
  Variant (314)..(315): Xaa in position 314 to 315 is any amino acid
  Variant (317)..(318): Xaa in position 317 to 318 is any amino acid
  Variant (326)..(327): Xaa in position 326 to 327 is any amino acid
  Variant (329)..(329): Xaa in position 329 is any amino acid
  Variant (330)..(330): Xaa in position 330 is any or no amino acid
  Variant (334)..(334): Xaa in position 334 is any amino acid
  Variant (337)..(337): Xaa in position 337 is any amino acid
  Variant (340)..(340): Xaa in position 340 is any amino acid
  Variant (342)..(342): Xaa in position 342 is any amino acid
  Variant (344)..(346): Xaa in position 344 to 346 is any amino acid
  Variant (357)..(357): Xaa in position 357 is any amino acid
  Variant (360)..(360): Xaa in position 360 is any amino acid
  Variant (363)..(365): Xaa in position 363 to 365 is any amino acid
  Variant (367)..(368): Xaa in position 367 to 368 is any amino acid
  Variant (370)..(370): Xaa in position 370 is any amino acid
CDLXXGXWVXDXXXXXXPLYXEXXCXFLTXQVTCXXNGRXDXXXQXWRWQPXXCXLPXFXAXXXXEXXRXKRXMFVGDSLNRNQWESXVCLVQSXXXXXXKXXXXXXXXGSXXXFXXXXXXYXATXEFYWAPFLVESNSDXPXXXHSIXXRXIXXXXIXXHXXNWXXVDYLXFNTYIWWMNXXXXKXXXXXXXXXXXXXXXXXXXXXXEXXRXXAYXXVXXTWXXWXXXXXDPXXTXVXFXXXSPXHXXXXXWXXXPXXXXCXXETXPXXNXXXXXXXXXXXXXXXDXXLXXXXXXVXXXXXXXVPXXXXXITXXSXXRKDAHTSXXTXXQGKXLTXEQXAXPXXXADCIHWCLPGXPDXWNXXXYXXIXS

SEQ ID NO: 1703 - protein, 33 aa, Artificial sequence
  protein pattern
  Variant (4)..(4): Xaa in position 4 is any or no amino acid
  Variant (6)..(6): Xaa in position 6 is any or no amino acid
  Variant (8)..(8): Xaa in position 8 is any amino acid
  Variant (9)..(9): Xaa in position 9 is Glu or Lys
  Variant (11)..(11): Xaa in position 11 is any amino acid
  Variant (12)..(12): Xaa in position 12 is Ala or Asn
  Variant (13)..(13): Xaa in position 13 is Asp or Asn
  Variant (15)..(16): Xaa in position 15 to 16 is any amino acid
  Variant (17)..(17): Xaa in position 17 is Phe or Tyr
  Variant (28)..(28): Xaa in position 28 is Leu or Val
  Variant (31)..(31): Xaa in position 31 is any amino acid
QGKXLXTXXQXXXPXXXADCIHWCLPGXPDXWN

SEQ ID NO: 1704 - protein, 40 aa, Artificial sequence
  protein pattern
  Variant (2)..(2): Xaa in position 2 is any amino acid
  Variant (3)..(4): Xaa in position 3 to 4 is any or no amino acid
  Variant (6)..(7): Xaa in position 6 to 7 is any or no amino acid
  Variant (9)..(9): Xaa in position 9 is Glu, Gly, Ser or Thr
  Variant (13)..(13): Xaa in position 13 is any amino acid
  Variant (16)..(16): Xaa in position 16 is Ser or Thr
  Variant (18)..(19): Xaa in position 18 to 19 is any amino acid
  Variant (23)..(23): Xaa in position 23 is any amino acid
  Variant (25)..(25): Xaa in position 25 is Asp or Ser
  Variant (26)..(26): Xaa in position 26 is any amino acid
  Variant (27)..(27): Xaa in position 27 is Phe, Trp or Tyr
  Variant (29)..(29): Xaa in position 29 is any amino acid
  Variant (35)..(35): Xaa in position 35 is any amino acid
  Variant (36)..(36): Xaa in position 36 is Asp, Glu, Gly or Asn
  Variant (38)..(38): Xaa in position 38 is Asp or Ser
  Variant (39)..(39): Xaa in position 39 is Leu or Met
YXXXEXXCXFLTXQVXCXXNGRXDXXXQXWRWQPXXCXXP

SEQ ID NO: 1705 - protein, 42 aa, Artificial sequence
  protein pattern
  Variant (2)..(2): Xaa in position 2 is any amino acid
  Variant (4)..(5): Xaa in position 4 to 5 is any amino acid
  Variant (8)..(8): Xaa in position 8 is Ile or Val
  Variant (9)..(10): Xaa in position 9 to 10 is any amino acid
  Variant (12)..(12): Xaa in position 12 is any or no amino acid
  Variant (14)..(17): Xaa in position 14 to 17 is any amino acid
  Variant (18)..(18): Xaa in position 18 is any or no amino acid
  Variant (20)..(20): Xaa in position 20 is Ala or Glu
  Variant (21)..(21): Xaa in position 21 is any amino acid
  Variant (23)..(23): Xaa in position 23 is Ala or Gly
  Variant (24)..(25): Xaa in position 24 to 25 is any amino acid
  Variant (27)..(27): Xaa in position 27 is any amino acid
  Variant (28)..(28): Xaa in position 28 is Asp, Gly or Asn
  Variant (29)..(29): Xaa in position 29 is Ala or Val
  Variant (31)..(31): Xaa in position 31 is Phe or Tyr
  Variant (33)..(33): Xaa in position 33 is Ile or Val
  Variant (36)..(36): Xaa in position 36 is Ser or Thr
  Variant (41)..(41): Xaa in position 41 is Leu or Met
DXPXXHSXXXRXIXXXXXIXXHXXXWXXXDXLXFNXYIWWXN

SEQ ID NO: 1706 - protein, 28 aa, Artificial sequence
  protein pattern
  Variant (2)..(2): Xaa in position 2 is Phe, Leu or Met
  Variant (17)..(17): Xaa in position 17 is Leu or Met
  Variant (20)..(20): Xaa in position 20 is Leu or Met
  Variant (22)..(22): Xaa in position 22 is any amino acid
  Variant (23)..(25): Xaa in position 23 to 25 is any or no amino acid
  Variant (27)..(27): Xaa in position 27 is any amino acid
  Variant (28)..(28): Xaa in position 28 is Ala, Gly, Ile or Val
RXMFVGDSLNRNQWESXVCXVXXXXSXX

SEQ ID NO: 1707 - protein, 44 aa, Artificial sequence
  protein pattern
  Variant (2)..(3): Xaa in position 2 to 3 is any amino acid
  Variant (6)..(6): Xaa in position 6 is any or no amino acid
  Variant (8)..(8): Xaa in position 8 is any or no amino acid
  Variant (10)..(10): Xaa in position 10 is Phe, Ile, Leu or Met
  Variant (11)..(11): Xaa in position 11 is any amino acid
  Variant (13)..(13): Xaa in position 13 is any amino acid
  Variant (14)..(14): Xaa in position 14 is Ala, Gly or Ser
  Variant (15)..(15): Xaa in position 15 is any amino acid
  Variant (17)..(17): Xaa in position 17 is Ile, Leu or Val
  Variant (18)..(18): Xaa in position 18 is Asp, Glu or Asn
  Variant (19)..(20): Xaa in position 19 to 20 is any amino acid
  Variant (21)..(21): Xaa in position 21 is Ile or Val
  Variant (22)..(22): Xaa in position 22 is Asp or Asn
  Variant (24)..(25): Xaa in position 24 to 25 is any amino acid
  Variant (26)..(26): Xaa in position 26 is Ser or Thr
  Variant (27)..(27): Xaa in position 27 is any amino acid
  Variant (29)..(29): Xaa in position 29 is Phe or Leu
  Variant (31)..(31): Xaa in position 31 is any amino acid
  Variant (32)..(32): Xaa in position 32 is Ala, Gly, Ser or Thr
  Variant (33)..(33): Xaa in position 33 is any amino acid
  Variant (36)..(36): Xaa in position 36 is any amino acid
  Variant (38)..(38): Xaa in position 38 is Phe, Ile, Leu, Met or Val
  Variant (39)..(39): Xaa in position 39 is any amino acid
  Variant (40)..(40): Xaa in position 40 is Pro or Ser
  Variant (41)..(41): Xaa in position 41 is any amino acid
  Variant (42)..(42): Xaa in position 42 is Ala, Asp, Gly, Asn or Val
  Variant (44)..(44): Xaa in position 44 is Ala, Glu, Gly or Asn
RXXAYXRXVXXTXXXWXXXXXXPXXXXVXFXXXSPXHXXXXXWX

SEQ ID NO: 1708 - protein, 18 aa, Artificial sequence
  protein pattern
  Variant (2)..(2): Xaa in position 2 is Asn or Arg
  Variant (5)..(5): Xaa in position 5 is Ile, Leu or Val
  Variant (10)..(10): Xaa in position 10 is Ala or Ser
  Variant (15)..(15): Xaa in position 15 is Glu or Gln
YXATXEFYWXPFLVXSNS

SEQ ID NO: 1709 - protein, 25 aa, Artificial sequence
  protein pattern
  Variant (2)..(2): Xaa in position 2 is any or no amino acid
  Variant (4)..(4): Xaa in position 4 is Ile or Val
  Variant (5)..(5): Xaa in position 5 is any amino acid
  Variant (6)..(6): Xaa in position 6 is Phe, Leu or Val
  Variant (7)..(7): Xaa in position 7 is Ile, Leu or Val
  Variant (8)..(8): Xaa in position 8 is Asp or Asn
  Variant (9)..(9): Xaa in position 9 is Ile or Val
  Variant (11)..(11): Xaa in position 11 is any amino acid
  Variant (12)..(12): Xaa in position 12 is Leu or Met
  Variant (14)..(14): Xaa in position 14 is Asp or Glu
  Variant (15)..(15): Xaa in position 15 is any amino acid
  Variant (19)..(19): Xaa in position 19 is Ala or Gly
  Variant (23)..(23): Xaa in position 23 is Phe, Leu or Val
  Variant (24)..(24): Xaa in position 24 is His or Tyr
  Variant (25)..(25): Xaa in position 25 is Gly, Ser or Thr
VXPXXXXXXTXXSXXRKDXHTSXXX

SEQ ID NO: 1710 - protein, 16 aa, Artificial sequence
  protein pattern
  Variant (2)..(2): Xaa in position 2 is Asp or Glu
  Variant (4)..(5): Xaa in position 4 to 5 is any amino acid
  Variant (7)..(7): Xaa in position 7 is Glu, Gln or Arg
  Variant (9)..(9): Xaa in position 9 is Thr or Val
  Variant (10)..(10): Xaa in position 10 is any amino acid
  Variant (12)..(12): Xaa in position 12 is Ala, Glu or Asn
  Variant (13)..(15): Xaa in position 13 to 15 is any amino acid
  Variant (16)..(16): Xaa in position 16 is Glu, Pro or Gln
CXLXXGXWXXDXXXXX

SEQ ID NO: 1711 - protein, 21 aa, Artificial sequence
  protein pattern
  Variant (2)..(2): Xaa in position 2 is Asp, Glu, Gly or Asn
  Variant (3)..(3): Xaa in position 3 is Ala, Gly or Asn
  Variant (4)..(4): Xaa in position 4 is Ile or Val
  Variant (5)..(5): Xaa in position 5 is Lys or Arg
  Variant (7)..(8): Xaa in position 7 to 8 is any amino acid
  Variant (10)..(10): Xaa in position 10 is any or no amino acid
  Variant (12)..(12): Xaa in position 12 is any or no amino acid
  Variant (14)..(15): Xaa in position 14 to 15 is any amino acid
  Variant (16)..(16): Xaa in position 16 is Asn or Ser
  Variant (17)..(20): Xaa in position 17 to 20 is any amino acid
  Variant (21)..(21): Xaa in position 21 is Phe, Ile, Leu or Val
PXXXXCXXEXTXPXXXXXXXX

SEQ ID NO: 1712 - protein, 11 aa, Artificial sequence
  protein pattern
  Variant (2)..(3): Xaa in position 2 to 3 is any amino acid
  Variant (4)..(4): Xaa in position 4 is Phe, Leu or Met
  Variant (5)..(5): Xaa in position 5 is Leu or Met
  Variant (7)..(7): Xaa in position 7 is any amino acid
  Variant (8)..(8): Xaa in position 8 is Leu or Met
  Variant (10)..(10): Xaa in position 10 is Gly or Asn
AXXXXEXXRXK

SEQ ID NO: 1713 - DNA, 1773 bp, Arabidopsis thaliana; identical to SEQ ID NO: 27
  CDS (1)..(1773)

SEQ ID NO: 1714 - protein, 590 aa, Arabidopsis thaliana; identical to SEQ ID NO: 28

SEQ ID NO: 1715 - DNA, 2124 bp, Brassica napus
  CDS (150)..(1862)
acttttcaagctcacacctcattaatactcccacaagtgccgtgtaatcattctcttatcgctttacccttttcccgaaacttatcttttcgtcacccatctccgccaccgtaaccgtcaccgtcaacttctgtttccgacaaaggacaatggaagaaaaggatgtgtatacggaagatggaactgtcgatattcacaaaaaccctgccaacaagaagaagaccggaaactggaaagcttgccgcttcatccttggcaatgagtgctgtgaaagattggcatactatggaatgggaactaacctcgtgaactatcttgagagtcgtctgaatcaaggcaacgctactgctgcaaacaacgtcaccaactggtccggaacatgttatataactcctttgattggtgcctttctagctgatgcttatcttggacgttactggactattgcaacctttgttttcatctatgtctccggcatgactctgttgacattatcagcctcagttcctggacttaaacccggtaactgcaacggcgacacgtgtcaccccaactctggccaaacagctgttttcttcgttgcactttacatgatcgcgcttggaacgggaggtattaagccgtgtgtttcctcctttggagctgatcagttcgatgagaatgacgaagccgagaagctgaagaaaagctctttcttcaactggttttacttctccattaacgtcggagctcttgttgccgccactgttcttgtctggatacaaatgaacgttggttggggatgggggttcggtgttccgacagtggctatggtcattgcggttgtgtttttcttcctggggagtcgttactacaggcttcaaagacctggtgggagtccactcacgaggatctttcaggttattgttgctgctttcaggaaggtgagtgttaaggttccagaggacaagtctctgctctttgaaactgcagatgatgagagtaatatcacaggtagcaggaagcttgagcacacagacaacttaatgtttttcgacaaggcagcggttgagagtcattcagatagcatcaaagacggtgaggtgaatccatggagactctgctcagtaacacaagtagaagagctcaagtccataatcactcttcttccagtatgggcctcagggatagtctttgcaacagtgtacagccaaatgaacacaatgttcgtcttacaaggaaacacaatggaccaacacatggggaaaaatttcgagatcccatcggcttccctctcgcttttcgacacggtcagtgtactcttctggactcctgtctacgaccagtttattgtcccgttcgctagaaagttcacacgtcaagaacgtggcttcactcagcttcaacgtatgggaataggtctcgtgatctccatctttgccatggtcactgcaggtgttttggaggtcgttaggctcgactacgtcaaaagccacaatgcatacgatgataaaaagatccccatgtcgattttctggcagatacctcagtatttacttgttgggtgtgctgaagttttcacatttataggtcagcttgagtttttctatgaccaggctccagatgccatgaggagtctctgctctgctttgtctttaaccacggttgcgcttgggaactacttaagcacggttcttgtaacggttgtgatgaaactgactaagaagaatggtaaaccgggttggataccggataacttgaaccgggggcatcttgattactttttctacttgctggcggttctgagtttcctcaacttcttggtgtacctatggatctctaaacgctacaagtataagaaagctataggtcgggcacattgatgaaacaaactggcttcaattcttgagattcttcacagggttacagtgttggtttaggttttgtttaatattatttcaaagttcttggttgtaatttttaaatgtagatatacgtgtagttgatgatttgggtttgggtttggcttcggctttggtaactgtattgtgtgtgcttcctgaataatgctagtacttctctgtaaaaggttatttgattaagaaaaaaaaaaaaaaaaaaaaaaaaaaaaaaaaaaaaaaaaaa

SEQ ID NO: 1716 - protein, 570 aa, Brassica napus
MEEKDVYTEDGTVDIHKNPANKKKTGNWKACRFILGNECCERLAYYGMGTNLVNYLESRLNQGNATAANNVTNWSGTCYITPLIGAFLADAYLGRYWTIATFVFIYVSGMTLLTLSASVPGLKPGNCNGDTCHPNSGQTAVFFVALYMIALGTGGIKPCVSSFGADQFDENDEAEKLKKSSFFNWFYFSINVGALVAATVLVWIQMNVGWGWGFGVPTVAMVIAVVFFFLGSRYYRLQRPGGSPLTRIFQVIVAAFRKVSVKVPEDKSLLFETADDESNITGSRKLEHTDNLMFFDKAAVESHSDSIKDGEVNPWRLCSVTQVEELKSIITLLPVWASGIVFATVYSQMNTMFVLQGNTMDQHMGKNFEIPSASLSLFDTVSVLFWTPVYDQFIVPFARKFTRQERGFTQLQRMGIGLVISIFAMVTAGVLEVVRLDYVKSHNAYDDKKIPMSIFWQIPQYLLVGCAEVFTFIGQLEFFYDQAPDAMRSLCSALSLTTVALGNYLSTVLVTVVMKLTKKNGKPGWIPDNLNRGHLDYFFYLLAVLSFLNFLVYLWISKRYKYKKAIGRAH

SEQ ID NO: 1717 - DNA, 1965 bp, Brassica napus
  CDS (46)..(1797)
ttcaaatcaaaatctctttggatactatcaaacgaaactgcatagatggatcaaaaagtaagacagtttgaggtttgcactcaagatggaagcgttgatcgtcacggtaatccagcaatccgagccaaaaccggcaaatggctcagtgctattctcattcttgtgaaccaagggcttgcaacgcttgccttcttcggtgtaggagtgaacttagttctgtttctgacgagagtgatgggacaagacaatgcagaagctgccaatagtgtcagtaaatggacaggaactgtttacatcttctctctgcttggtgctttcctcagtgactcttattggggacgctacaagacttgtgcaatcttccaaggaagtttcgttgtgggactggtgatgttatctttatctactgctgctttgttacttgaaccaagtggttgtggagttgaagagtcaccgtgtaagccacactcaacgttcaagacagtcatcttttacctatcagtgtatctgatcgcgttagggtacggtggttaccagccgaatatagctacctttggagctgatcagtttgatgcagacgactctgttgaaggacactcgaaaatcgcgttcttcagttacttctacttggctttgaatcttggatcgctcttgtcgaacaccgtcttgagttactttgaggatcaaggagactggcctttagggttttgggcgtctacaggctctgcttttgcaggtttagtacttttcttgactggcacgccaaagtacagacactttacacctagagaaagtccttggtctagattctgccaagtcttggttgctgcaacaagaaaagccaagattgatgtgaactatgaggacatgaatctctacgattcagagactcaacgaaccggagataagaagattcttcacaccagtggcttcagattcttggatagagctgcgatagttacgcctgatgatgatgctgagaaggtggagagtggatcaacttacaatccatggaggctctgctcggtgactcaagttgaagaagtgaaatgtgtgttcagactcataccaatctggctctgcaccattctctactctgtggttttcactcagatggcttcactcttcgttgagcaaggcgcagcgatgaaaacaaacatcaaagacttcaagattccagcttcaagcatgtctagcttcgacattctcagcgtcgccttcttcgtcttcgcttacaggaggtttctagatcctctctttgcaaggcttaacaaaacagaacccaacaaaggtctcaccgagcttcagagaatggggataggtcttgtgattgcgataatggcgatgatatcagcaggaatagtggagatatacaggctgaaacacaaggaaactgcttcaaactcgagctcgttgagcatattctggcaagtgcctcagtacatgatgataggtgcatcagaagtgttcatgtacgttggtcagcttgagttcttcaacagccaagctccaacggggttaaagagctttgcaagcgccctatgtatggcgtcaatatcgcttgggaactatgtaagtagtctgctggtttccatcgttatgagcatctctacaagagatgatttgcctggttggatccctgggaacctcaacaaaggacacttagacagattctacttcctcttagctggtctaactgcagctgatttcgtggtttacctggtttgtgctaaatggtataagtatattaagtccgaagcaagtttctctgagtccacatctgaagaagaagtctgagtcagagagttttgggggttgcgctgtgaagctatggacagtaaatatccaaagctgagcttgttctgtcatatattggtctagtggttttcttttgggatactcttttgtgcaaagttttgttaatgtttataaataaagacaagtttgtgcaaaaaaaaaaaaaaa

SEQ ID NO: 1718 - protein, 583 aa, Brassica napus
MDQKVRQFEVCTQDGSVDRHGNPAIRAKTGKWLSAILILVNQGLATLAFFGVGVNLVLFLTRVMGQDNAEAANSVSKWTGTVYIFSLLGAFLSDSYWGRYKTCAIFQGSFVVGLVMLSLSTAALLLEPSGCGVEESPCKPHSTFKTVIFYLSVYLIALGYGGYQPNIATFGADQFDADDSVEGHSKIAFFSYFYLALNLGSLLSNTVLSYFEDQGDWPLGFWASTGSAFAGLVLFLTGTPKYRHFTPRESPWSRFCQVLVAATRKAKIDVNYEDMNLYDSETQRTGDKKILHTSGFRFLDRAAIVTPDDDAEKVESGSTYNPWRLCSVTQVEEVKCVFRLIPIWLCTILYSVVFTQMASLFVEQGAAMKTNIKDFKIPASSMSSFDILSVAFFVFAYRRFLDPLFARLNKTEPNKGLTELQRMGIGLVIAIMAMISAGIVEIYRLKHKETASNSSSLSIFWQVPQYMMIGASEVFMYVGQLEFFNSQAPTGLKSFASALCMASISLGNYVSSLLVSIVMSISTRDDLPGWIPGNLNKGHLDRFYFLLAGLTAADFVVYLVCAKWYKYIKSEASFSESTSEEEV

SEQ ID NO: 1719 - DNA, 1917 bp, Brassica napus
  CDS (14)..(1771)
cgaagcgagaaggatgggctccattgaagaagaatcacctctcatcgaagaaggtttaatctcacaggaaccaaaactgtatgctcaagatggttcagtggaccttcatggaaacccaccgttgaaggagaagacaggcaactggaaagcttgtcctttcattttaggcaatgaatgctgcgagaggctagcttactatggtatcgctgggaatctaatcacttacctcaccactaaactccaccaaggaaacgtttcagctgctagaaacgtcaccacatggcaggggacttgttatctcacccctctcattggtgctgtcttagccgatgcttactggggcagatactggaccatcgcttgtttctccggcatttacttcatcggcatgtctgcgctaactctctcagcgtcagttccagcattgaaaccagctgaatgcattggcggtttctgtccatcagcaacaccagctcagtacgcaatgttctttggcgggctttacctcatcgccctcggcactggaggcatcaaaccatgcgtctcatccttcggtgcagaccagttcgatgacactgactcgcgcgaacgagttaagaaagcttccttcttcaactggttctacttctccatcaacattggagcgctagtctcttctagtcttcttgtctggatccaagagaaccgcggctggggtttaggttttggtataccaacagtgttcatgggactcgccattgcaagtttcttctttggcacacctctttacaggtttcagaagcctggaggcagccctatcactcgaatctctcaagtggtggtcgcctcgttccgtaaatccactctcaaagtccctgaagacgctatgcttctgtatgaaacgcaggacaagaactctgctattgctggaagtcgaaaaatcgaacataccgatgattgccagtatcttgacaaagctgctgtgatctcagaagaagaatccaaagccggagacgtttccaactcgtggagactatgtactgtcactcaagtcgaagaactcaagattctgatacgaatgttccctatctgggcttctggtatcatcttctcagctgtatacgcacaaatgtccacgatgtttgttcaacaaggccgagccatggactgcaaaataggatcgttccagcttcctcctgcagccctcgggacgtttgacacagctagtgtcatcatctgggttcctctctacgacaggttcatcgtccctttagctagacggtttactggagtagacaaaggattcactgagatacaaagaatgggggtcggtttgtttgtctctgttctctgtatggcagctgcagccgttgttgaaatcatcaggctccatttagccaacgagctcgggttggttgagtctggagctcctgttcctatatctgtgttatggcagatcccacagtacttcatcctcggtgcagcggaagtgttctacttcattgggcagctggagtttttctatgatcagtctccagatgcaatgaggagcttgtgcagtgcgttggctcttttgaccaatgcgcttgggaactacttgagttcgttgatcctcacgctggtgacttacttcacgacgaggaacggtggagaaggttggatatcagataatctgaactcgggtcatcttgattactacttctggcttttggctggtcttagccttgtgaacatggctgtttacttcttctctgcggctaggtataagcagaagaaggcgtccaagttataatgtggttgttctctctctctctccttccattacatacaataagtatgtttctcttcttgtgtaaattgtgtctgtttaaaagaacaactgtttgtgtactcgtttctttcagttccaaacaatctctcacgaaaaaaaaaaaaaaa

SEQ ID NO: 1720 - protein, 585 aa, Brassica napus
MGSIEEESPLIEEGLISQEPKLYAQDGSVDLHGNPPLKEKTGNWKACPFILGNECCERLAYYGIAGNLITYLTTKLHQGNVSAARNVTTWQGTCYLTPLIGAVLADAYWGRYWTIACFSGIYFIGMSALTLSASVPALKPAECIGGFCPSATPAQYAMFFGGLYLIALGTGGIKPCVSSFGADQFDDTDSRERVKKASFFNWFYFSINIGALVSSSLLVWIQENRGWGLGFGIPTVFMGLAIASFFFGTPLYRFQKPGGSPITRISQVVVASFRKSTLKVPEDAMLLYETQDKNSAIAGSRKIEHTDDCQYLDKAAVISEEESKAGDVSNSWRLCTVTQVEELKILIRMFPIWASGIIFSAVYAQMSTMFVQQGRAMDCKIGSFQLPPAALGTFDTASVIIWVPLYDRFIVPLARRFTGVDKGFTEIQRMGVGLFVSVLCMAAAAVVEIIRLHLANELGLVESGAPVPISVLWQIPQYFILGAAEVFYFIGQLEFFYDQSPDAMRSLCSALALLTNALGNYLSSLILTLVTYFTTRNGGEGWISDNLNSGHLDYYFWLLAGLSLVNMAVYFFSAARYKQKKASKL

SEQ ID NO: 1721 - DNA, 2131 bp, Glycine max
  CDS (114)..(1886)
aaaacacacacggttggttcattctctctcttttctttttcctcaaaaagttgaaaaagaataaagggggaacaatcgagtgaagttgttgctcttcaatagtaaacttacctatggaagagggaagggttgtgagtgagtacacaaaagatggaactgtggatcttaaagggaaacccattctcaaatccaaaagtggtggttggaaagcatgctcctttgttgttgtgtacgagatatttgaaagaatggcttattatggaatatcatcaaatttgatactgtatctgactaggaagcttcaccaaggcactgtgacctcttccaacaacgtcaccaattgggttggcaccatttggataactcctatcttaggagcctacgttgccgatgctcatcttggtcgcttttggacttttctcattgcctcagtcatctatttattgggtatgtctctacttacgctatcggtgtcccttccaagcctaaagccaccagagtgccatgaattggatgtgacaaaatgtgaaaaagcctccacactacatctagctgtgttctatggtgcactctacactcttgcactaggaaccggtggaaccaagccaaacatttccacaattggtgctgaccaatttgatgactttgactccaaagagaagaagctcaagctctccttcttcaattggtggatgtttagcatcttcattgggaccctctttgcaaattctgttctggtctatatacaagacaatgtggggtggactcttgggtatgctcttcccactcttggacttgcaatatcaatcatcatattcttggcaggcacacccttttatagacacaaattgcccacggggagtccattcactaagatggccaaggtcatagtggctgctataaggaaatggaaagtgcatattcctagtgacactaaagaactttatgagcttgatttggaagagtatgccaagagagggagagtcagaattgattccactccaaccttgaggttcctcaacaaggcatgtgtcaacaccgattcaagtactagtggatggaagctaagccctgttacccatgtggaggagaccaaacaaatgctaagaatgatcccaatcttggctgctacattgatccctagtgcaatggttgcacaaataggtaccctttttgtgaagcaagggattacacttgacagaggcattggcagcttcaatatacccccggcaagtttagccacatttgtgactctatccatgcttgtatgtgtggtgctctatgaccgtttctttgtcaagatcatgcaaaggtttaccaagaaccctagagggataacccttctccaaaggattggaattggcctcataatccacatagtgattatggtgattgcatctctaactgaaaggtatagacttagagtggccaaagaacatgggctattagaaaatggaggacaagttcctttgagcattttcatcttgcttcctcaatatgttcttatgggagcagctgatgcgtttgtcgaggttgccaaaatcgagttttcctatgaccaagccccagaaagcatgaagagccttggcacttcctattcaatgactaccttaggcattgggaatttcctaagcacttttcttctcacaacaatttcacatgtcaccaagaaacatggccaccgaggatgggttttgaacaacttgaatgcttctcatcttgactactactatgcacttttggccatactaaacttggtgaacttcgtattcttcatggttgtgacaaagttctatgtgtatagagctgaaatttcagattccataaaagtgcttgaggaagagctcaaggaaaagacatcaaaccaggtgattccaagagattaattagatatttgaaagtagaagatgtgatatatgtcagccaaaatttcagaaacatgcatgatgcttgggatggtttagataatttgaagccattttttagaagaaatggagaatatatatgtcatgggcgatagggtctttaatgtgtgatataatttggacttcactcttcaagaaacgtcacgttcattgtggaaagaacaaagtagaagtgaatatttaatttttttaaaaaaaaaaaaaaa

SEQ ID NO: 1722 - protein, 590 aa, Glycine max
MEEGRVVSEYTKDGTVDLKGKPILKSKSGGWKACSFVVVYEIFERMAYYGISSNLILYLTRKLHQGTVTSSNNVTNWVGTIWITPILGAYVADAHLGRFWTFLIASVIYLLGMSLLTLSVSLPSLKPPECHELDVTKCEKASTLHLAVFYGALYTLALGTGGTKPNISTIGADQFDDFDSKEKKLKLSFFNWWMFSIFIGTLFANSVLVYIQDNVGWTLGYALPTLGLAISIIIFLAGTPFYRHKLPTGSPFTKMAKVIVAAIRKWKVHIPSDTKELYELDLEEYAKRGRVRIDSTPTLRFLNKACVNTDSSTSGWKLSPVTHVEETKQMLRMIPILAATLIPSAMVAQIGTLFVKQGITLDRGIGSFNIPPASLATFVTLSMLVCVVLYDRFFVKIMQRFTKNPRGITLLQRIGIGLIIHIVIMVIASLTERYRLRVAKEHGLLENGGQVPLSIFILLPQYVLMGAADAFVEVAKIEFSYDQAPESMKSLGTSYSMTTLGIGNFLSTFLLTTISHVTKKHGHRGWVLNNLNASHLDYYYALLAILNLVNFVFFMVVTKFYVYRAEISDSIKVLEEELKEKTSNQVIPRD

SEQ ID NO: 1723 - DNA, 2029 bp, Glycine max
  CDS (102)..(1820)
ccgggtgagttgccaactttaagtttgtcaatttccgtgctgcttggttggttgcaattgcaagtgaacaattggctagtgtgtactagttttgaatcacaatggcagaggatgatggttacacgaaagatggaacagtcgattactgtggaaatccagctaataaaaaggaaactggaacctggaaagcctgcccctatatcttaggaaacgaatgttgtgagagattggcttattatgggatgagcacaaacctggtgctttatttcaagaaccggctaaatcagcatagtgctactgcttccaagaatgtctctaattggagtggaacttgctatatcacaccattgattggggcatatttggctgattcctaccttggaagatattggacaattgctgttttttcaataatttatgctattggaatgacactcttgacattgtctgcatcagttcctggcataaaaccaacatgtcatggacatggagatgaaaattgtcgtgctactactctagagagtgcagtgtgcttcctagctctttaccttattgctcttggcaccggtggcattaagccttgtgtctcatcctatggagcagatcagtttgatgacactgactcggctgagaaggaacgcaagagttctttcttcaattggttctatttttcaatcaacattggcgctcttattgcatcttctctattggtttggatacaagataatgtgggttggggatggggctttggtattcctgctgtagccatggcaattgctgtggtgagtttcttttcaggcactaggttgtataggaatcagaagcctggaggcagtgccatcactagaatctgtcaggtggtaatggcatccataagaaaatacaatgttgaagtacctgctgacgagtcacttttatatgagactgctgaaactgaatctgctataaaaggaagccgaaagcttgaccacacaaatgagctaagattttttgacaaagcagcagtgctagcacagtcagataaagtgaaggaatcaacaaacccttggagactttgcactgtaactcaagtggaagagctgaaatccattttaagaatacttcctgtatgggccactggcatcatattttccactgtctatggtcaaatgagcaccttatttgtgttgcaaggacaaaccatggacactcgtgttggcaactccactttcaaaatcccaccagcttcactgtccatctttgacaccctcagtgtcatattttgggtcccagtgtatgacaggatcattgtgccaattgctacaaagttcactgggaacaaaaatggcctaactcagctccagagaatgggaattggcctcttcatatccatattttccatggtagctgcagcaatattggagctcatacggcttagaatggtgaggaggcacaactactatcaacttgaggagataccaatgacaatattttggcaggttcctcaatatttcatcataggctgtgcagaagtcttctatttcattggtcagttggagttcttctatgagcaagcccctgatgctatgcgaagcttttgttctgctctctcacttaccactgttgcgcttggacagtacttgagctctctgcttgtgacaattgtgacaaagatcagcactaggaatggaagtccagggtggatacctgataatctaaactttggtcacatagattatttcttctggctattggcattgctaagtgtagtgaacttgatagcattccttgtggtgtctatgttgtatacatataagagacctgtgggaactctgcgctgaaaagtgggttaagttgtacattggaagtagtttcattatacatcacattggaagtttccttcacttgtagtcttgtttttcacctacactgtaagctcttgtgtcaaatccttgaaaaaatgatgtaaaattgttattatcaccattgctattatgtgtctgatctttctcatcaacatgcaggaattaaagttaaaaaaaaaaaaaaa

SEQ ID NO: 1724 - protein, 572 aa, Glycine max
MAEDDGYTKDGTVDYCGNPANKKETGTWKACPYILGNECCERLAYYGMSTNLVLYFKNRLNQHSATASKNVSNWSGTCYITPLIGAYLADSYLGRYWTIAVFSIIYAIGMTLLTLSASVPGIKPTCHGHGDENCRATTLESAVCFLALYLIALGTGGIKPCVSSYGADQFDDTDSAEKERKSSFFNWFYFSINIGALIASSLLVWIQDNVGWGWGFGIPAVAMAIAVVSFFSGTRLYRNQKPGGSAITRICQVVMASIRKYNVEVPADESLLYETAETESAIKGSRKLDHTNELRFFDKAAVLAQSDKVKESTNPWRLCTVTQVEELKSILRILPVWATGIIFSTVYGQMSTLFVLQGQTMDTRVGNSTFKIPPASLSIFDTLSVIFWVPVYDRIIVPIATKFTGNKNGLTQLQRMGIGLFISIFSMVAAAILELIRLRMVRRHNYYQLEEIPMTIFWQVPQYFIIGCAEVFYFIGQLEFFYEQAPDAMRSFCSALSLTTVALGQYLSSLLVTIVTKISTRNGSPGWIPDNLNFGHIDYFFWLLALLSVVNLIAFLVVSMLYTYKRPVGTLR

SEQ ID NO: 1725 - DNA, 2389 bp, Triticum aestivum
  CDS (155)..(1999)
ctcatcgcctcgcctcgtctcttgctccctctctctctctttgccttcttgctcggcctcctcgcagcagcagcagcagcctctcagcttctctctctcgttgcattactcgacggaggccggctgctgaggagatccagcgaggaagtgagaaatgtctgcgaacgagggagagctgaagatgagggtgatcgccatgggcggcgaggccgccgccgagaggagggctgccgaggagaagctctgcgagtacaccctggacggctccgtggacatcaaggggcggccggcggtgaagggcaagtcgggaggatggctcgccggaggccttattctcgtgaaccagggcctggcgacgatggccttcttcggcgtgaacgtgaacctggtgctgttcctgacgagggtggtgcagcagagcaacggcgacgcggccaacaacgtgagcaagtggaccggcaccgtctacatgttctccctcatcggcgccttcctcagcgactcctactggggccgctacaagacctgcgccatcttccaggccatcttcgtcctcgggctcgggctgctgtcgctctcctcgcggctatacctcatcaggccggtggggtgcggcacggagcacacgccctgcgcctcgcactccggcacggagatggggatcttctacatcgcgctctacatgatcgccttcggcaacggcggctaccagcccaacatcgccaccttcggggccgaccagttcgacgaggaggaccccgccgaggcgcactccaaggtctccttcttcagctacttctacctggcgctcaacctcggctcgctcttctccaacaccttcctcagctacctccaggaccacggcaagtgggttatcgggttctgggcctccaccgccgccgccgccaccgccctgctgctcttcctcagcggcacgccccagtaccgccacgcgcagccctgcggcaaccccatggccagcatctgccaggtcgcctccgccgcctgcaggaactggaagtccggcggcgtgtcgcaggacgtcgagatcctgtacgagggcgacgacaagacggacgccggctcaaggaagctcctgcacaccaaaggcttcaggttcttggaccgcgcggcgctcaccaccgaagacaccagctcgaagctcgccacctgcagcaaaacgcgcgaccagtggaagctgtgcacggtgacgcaggtggagcaagtgaagagcatcctgcggatcctccctatctgggtctgcaccatcctctactccgtcgtcttcacccagatggcgtcgctcttcgtcgtgcagggagccgcgatgcgccgatcaacacctttgggcagcttctcgatcccggcctccagcatgtcggccttcgacatcctcaccgtcgcgacaaccatcttcctgtaccggcgggccatctgcccgttcctggcacggttcactggacgctcgaccggacccacggagctgcagaggatgggcctcggcctggtcctcggcgcaatggccatggccaccgccggcacggtggagcacttcaggaaggccagcgcgaccacggcgaacagcagcgagctgcacatcctatggcaggtgccgcagtacgcgctgatcggcgtgtcggaggtgatgatgtacgtgggccagctcgagttcttcaacggcgagatgcccgacgggttcaagagcttcggcagcgcgctgtgcatgatgtccatgtccctcggcaactacttcagcgacatcatagtcagcgcggtgaccaaggccaccgcggtggacgggcggccgggctggatcccggcggacctgaacgagggccacctcaacaagttctacttcctgctcgccatactctccgttgccgacttcgcggtgtacctcgtcttcgccggccgctacaggaagagctgcaaggtggacgggcggagcgacgacgaggaggaagggagcgcggacgacgaggaggcatgccacgcgtgactcggccggcggcctctctcgacggccgcctggctgcggtggtttttgagatcggagacttgatgcacgagcgttggtacgtacgtttcagagcgcgcgacgggtctctcgttgatgataggacatgcatgggatcggcggtggctggctgctgctacgactaaagaataagcatgctcatgtgcaactacgatggcatgtacgtacgcctatgtcttagctatgtgttcgtttcttggcattttgggccagtgtcacgctgtaactgaccacttatgttcactgtaccgctgactggtctgctaccgcttcatttgtactcctatgcatgcatggacagtgcacttcatttgtatgcataactttctttgttccaaaaaaaaaaaaaaa

SEQ ID NO: 1726 - protein, 614 aa, Triticum aestivum
MSANEGELKMRVIAMGGEAAAERRAAEEKLCEYTLDGSVDIKGRPAVKGKSGGWLAGGLILVNQGLATMAFFGVNVNLVLFLTRVVQQSNGDAANNVSKWTGTVYMFSLIGAFLSDSYWGRYKTCAIFQAIFVLGLGLLSLSSRLYLIRPVGCGTEHTPCASHSGTEMGIFYIALYMIAFGNGGYQPNIATFGADQFDEEDPAEAHSKVSFFSYFYLALNLGSLFSNTFLSYLQDHGKWVIGFWASTAAAATALLLFLSGTPQYRHAQPCGNPMASICQVASAACRNWKSGGVSQDVEILYEGDDKTDAGSRKLLHTKGFRFLDRAALTTEDTSSKLATCSKTRDQWKLCTVTQVEQVKSILRILPIWVCTILYSVVFTQMASLFVVQGAAMRRSTPLGSFSIPASSMSAFDILTVATTIFLYRRAICPFLARFTGRSTGPTELQRMGLGLVLGAMAMATAGTVEHFRKASATTANSSELHILWQVPQYALIGVSEVMMYVGQLEFFNGEMPDGFKSFGSALCMMSMSLGNYFSDIIVSAVTKATAVDGRPGWIPADLNEGHLNKFYFLLAILSVADFAVYLVFAGRYRKSCKVDGRSDDEEEGSADDEEACHA

SEQ ID NO: 1727 - DNA, 1927 bp, Linum usitatissimum
  CDS (20)..(1735)
agtcaaaaggataaaagccatgtcagaggaggaatttctcacgaaagatgggactctggatcataaagggaatcctgctgataagaggattactggaacctggaaagcatgtccctttatcataggaaatgaatgctgcgagagattggcttactatggcatgagctccaatctagtgctctacttcaagaatcagctgaaccaaagcagtgcaactgctaccaagaacaactctgactggagtggaacttgttacctcacacctctattgggagcctttcttgctgatgcttatcttggtagatactggactattgctggcttctcaatcatctatgtctttggaatgacacttttagcaatgtcagcatcagtcccgggcctgaaaccaacatgcatatcaaaagacaactgccacgccacagaaggacagagcgcggttttcttcgtagctctctacatgatagctctagggacaggagggatcaagccttgtgtctcatcctacggggcggaccagtttgatgatgctgacgtggaagagaaggagcacaaggcctctttcttcaattggttctacttctccatcaacgttggtgcattggttgctagctccttactggtttgggtccaggagaatgtgagctggggattggggtttgggatcccggccatagccatggctattgctgttgcgagtttcttttcagggacccgcaagtataggtatcagacgcctggtggtagccctcttactagaatctgtcaggtcattgtggcttcctgcagaaagtacaaagttagtcctcctaatgacaagtcgcttctttatgagagtgctgattctgaatccggcatcacaggcagccggaaactcgatcacaccaaagatttcagtttcctggacaaggcagcagtggagacagagaaagaccacataaaggacacatcagtaaacccatggaggctatgcacagtaacccaaatcgaggaattcaaagcaataatccgcctgctcccgatctgggcaaccggtatagtcttcgcagcagtatacagccaaatgagcaaccttttcgtcctacagggagacacaatggacaagcgagtaggaaactccaagttcaaaatctccgcagccaacgtatcagtattcgacacaatcagtgtcatattctgggtaccaatctacgacaggcttatagtcccagccgtcagaaaaatcacaggccacaagaacgggttcacccagctccaacgtatggggatcggcctagtcatctcgattttcgccatggtgtaccccgcgatcctggagctgatcaggcttaaaatggtgagggagcacaactactacgagctggaatcggtcccaatttcgatattctggcaggttccgcagtatttcctgatcggttgcgctgaggtgttcactttcatcggtcagctcgagttcttctacgagcaggcgcccgatgcgatgaggagcttgtgttcggctctttcgttgactactgtggcgttggggaattacttgagctcgctgctggtgacgattgtgacgggtgttacgactaagggagggaagcccgggtggattcctgataacttgaactatggccatgttgattacttcttctggctgctggctgtgcttagtgttgtgaatctgatggcgtatatggtgattgctagctggtatacttacaagaagcctgtggggactctgcgttgaatgctggtgagatgtattgttcttcctggtgtgtgtagtttgggaaaggagggtttgtttatactatgatgaaagaaaaccatgtgtatatagatgtcttaagatggtgcttttgttacatttctttggtttggtacattgttttcgatgcttcaaagtttggaaagaaacttagccaaaaaaaaaaaaaaa

SEQ ID NO: 1728 - protein, 571 aa, Linum usitatissimum
MSEEEFLTKDGTLDHKGNPADKRITGTWKACPFIIGNECCERLAYYGMSSNLVLYFKNQLNQSSATATKNNSDWSGTCYLTPLLGAFLADAYLGRYWTIAGFSIIYVFGMTLLAMSASVPGLKPTCISKDNCHATEGQSAVFFVALYMIALGTGGIKPCVSSYGADQFDDADVEEKEHKASFFNWFYFSINVGALVASSLLVWVQENVSWGLGFGIPAIAMAIAVASFFSGTRKYRYQTPGGSPLTRICQVIVASCRKYKVSPPNDKSLLYESADSESGITGSRKLDHTKDFSFLDKAAVETEKDHIKDTSVNPWRLCTVTQIEEFKAIIRLLPIWATGIVFAAVYSQMSNLFVLQGDTMDKRVGNSKFKISAANVSVFDTISVIFWVPIYDRLIVPAVRKITGHKNGFTQLQRMGIGLVISIFAMVYPAILELIRLKMVREHNYYELESVPISIFWQVPQYFLIGCAEVFTFIGQLEFFYEQAPDAMRSLCSALSLTTVALGNYLSSLLVTIVTGVTTKGGKPGWIPDNLNYGHVDYFFWLLAVLSVVNLMAYMVIASWYTYKKPVGTLR

SEQ ID NO: 1729 - DNA, 1110 bp, Arabidopsis thaliana; identical to SEQ ID NO: 104
  CDS (1)..(1110)

SEQ ID NO: 1730 - protein, 369 aa, Arabidopsis thaliana; identical to SEQ ID NO: 105

SEQ ID NO: 1731 - DNA, 1373 bp, Brassica napus
  CDS (32)..(1138)
cggtcgggggtttagcagtgaagtagcgaaaatggcgtctacagtatttctatccactttctcgtctgctcacctctcttcttctttcgccggcgactacgtagcgtcgtcgaggtgctttatcggagctcccgtcgcttcctcctcttctctatcgctgctctccggtaagaagaactcatatcctcttagaaagttccatgtctctgccaagaaagtatctggattggaagaagccattagaatcagaaggatgagagaagctgaagctagttcaaaggtcaagagaaacccaccgttaagacgagggagagtctcacctcgtcttctcgtccctgaccacataccaaagcctccttacgctgagtccggcgtgttacctgatatctcacctgacttccagattccttcccctgaaggccttgtcaaaatgagagctgcttgcgagctagctgctcgggttctaaactttgcagggactttggttaaaccatctgttacgactaatgagatagacaaagcggtgcatgatatgattgttgaagctggtgcttatccttcacctcttgggtatggtggttttcctaagagtgtgtgtacttcggttaacgagtgtatgtgtcatgggataccggattctcgccagcttcagagtggggatataattaacatcgatgtcacggtttacttggatggttaccatggagatacatcaagaactttcttctgtggagaggtcgatgaaggttttaaacgacttgtgaaggttacggaggaatgtttggagaaaggtatagcggtttgtaaagatggagcaaacttcaagaaaattggcaagagaatcagtgagcacgcagagaagtacggctacaacgtcgtggagcggtttgttgggcatggtgttggaccagtgtttcactctgaacctttgatttatcattaccgaaatgatgagccagggcatatggttgagggacaaactttcacaatcgaaccgattctaacgattggaaccacggaatgtgtaacatggccggacaactggactactctaacagctgatggtggtgtagccgcacagtttgagcacacaattctgattactagaactggttcagagattcttaccgtatgctgaaacaattcacttttgattcattcttttaccgttcccctctttgtcaaagatttcgtcaggctcttcatcgaccatggaatcaatagaatatacctttcatatggtttttatgattaatgcgcgtgttgtcgtagacttttctctgtctattgatcccttcatgggtctgtattattgtgaatttaaccaaaatctaagaccaaataattataattttctcaaaaaaaaaaaaaaa

SEQ ID NO: 1732 - protein, 368 aa, Brassica napus
MASTVFLSTFSSAHLSSSFAGDYVASSRCFIGAPVASSSSLSLLSGKKNSYPLRKFHVSAKKVSGLEEAIRIRRMREAEASSKVKRNPPLRRGRVSPRLLVPDHIPKPPYAESGVLPDISPDFQIPSPEGLVKMRAACELAARVLNFAGTLVKPSVTTNEIDKAVHDMIVEAGAYPSPLGYGGFPKSVCTSVNECMCHGIPDSRQLQSGDIINIDVTVYLDGYHGDTSRTFFCGEVDEGFKRLVKVTEECLEKGIAVCKDGANFKKIGKRISEHAEKYGYNVVERFVGHGVGPVFHSEPLIYHYRNDEPGHMVEGQTFTIEPILTIGTTECVTWPDNWTTLTADGGVAAQFEHTILITRTGSEILTVC

SEQ ID NO: 1733 - DNA, 1474 bp, Hordeum vulgare
  CDS (44)..(1099)
tctcccccatatcccgctcgcgcgcgcgtgcggcgcagtggccatggccatggcgagcccgccgtcgccgcgcctgctctgcgccctcctgggcgaccgcctcggcgcgctctccgccaggccgctcctccgcgccgccgccccaggcagagggcacaggcgggtgacgtgccaggccacgagaacgctctccagcctggtggacgccctcttcaacaggagaagtcgggatgactcactggaaaataaccctagacgcctacgacctgggaaagtgtctcctcgtctaaccgttcccagtcatatacagcagcctccttatgtcaattcccgtcaaagacctcagatgaacggtggacctgaaatacatgatgaaaaagggatcgaatgcatgagagcttctggaaagcttgccgcacaagttttgaagtttgctgggacacttgtaaatccaggcataacaactgatgagatagataaagcggtgcaccaaatgataatcgataatggtgcatacccgtcacctcttggttattgtggattcccgaagagtgtttgtacttcagtgaatgaatgcatctgtcacgggataccagattctcgtccacttgaggatggcgatatcatcaacatcgatgttactgtctatctcaatggttaccatggtgatacatctgctacatttctctgtggtgatgttgatgatgaagctaagaagttagttcaggtaacaaaagaatctcttgacaaggctatatcaatctgtgctcctggggtggagatcaaccgcattggtagaaccatacaggattatgcagacaaattcaagtatggtgtagttcaacaatttgtgggtcatggggtagggaaagtgttccattgcgagcctgcagtgcttcatttccgcaatagtgaaaaaggccgcatgattttgaaccaaacatttaccatagagccgatgctaaccatagggagcacaaactcgagcatatggtccgatgactggacggcggtgacggaggatgggagcctgtcagcgcagtttgagcacacgctactgatcactgaagacggtgtggaaatactgacacagtgttaagcccggccggagaacagagatgtcagtgagtgaaaggctggatggctgggacagaacctgcaatttttctgggacgacacatcgcccaatcaaactccaagtgcaaaactacacttttttatttatctcgattcgtcagtaggttgctgatgcatagattatacacaaagttttgcgttgttgttgggattatagggtgagcgagcagggcagatcagctcccttggttgttgcgggtaggcctgaattctgattgactgcctggattctgattgagttggtggttctggggttgatgaaagccacgttttgccgcatttgttggcagaaaggaaaaaaaatgaaggtctgctttgctttaaaaaaaaaaaaaaa

SEQ ID NO: 1734 - protein, 351 aa, Hordeum vulgare
MAMASPPSPRLLCALLGDRLGALSARPLLRAAAPGRGHRRVTCQATRTLSSLVDALFNRRSRDDSLENNPRRLRPGKVSPRLTVPSHIQQPPYVNSRQRPQMNGGPEIHDEKGIECMRASGKLAAQVLKFAGTLVNPGITTDEIDKAVHQMIIDNGAYPSPLGYCGFPKSVCTSVNECICHGIPDSRPLEDGDIINIDVTVYLNGYHGDTSATFLCGDVDDEAKKLVQVTKESLDKAISICAPGVEINRIGRTIQDYADKFKYGVVQQFVGHGVGKVFHCEPAVLHFRNSEKGRMILNQTFTIEPMLTIGSTNSSIWSDDWTAVTEDGSLSAQFEHTLLITEDGVEILTQC

SEQ ID NO: 1735 - DNA, 1578 bp, Arabidopsis thaliana; identical to SEQ ID NO: 190
  CDS (1)..(1578)

SEQ ID NO: 1736 - protein, 525 aa, Arabidopsis thaliana; identical to SEQ ID NO: 191

SEQ ID NO: 1737 - DNA, 1994 bp, Brassica napus
  CDS (18)..(1865)
cgcagattgaagaaaccatggaaagaaagccttttgaggttgagacaacaaagacggatgaggatcagaaaccctactccgccgtcgatggcggtggttctgattcggtcgattcatttgatgaagatcagaaaaagctcgtgtatagaggatggaaagtcatgccttttatcattggtaatgaaacatttgagaagattgggatcattgggacattatcaaaccttctcgtctacctaactcaagtattcaacctcaagaaatacacagctgcaaccatcatcaatgcctttagtggcaccatcaacttcggcactttcctcgctgctttcctctgcgacacttactttggtcgctacaagactctcagtgttgctgtcgtcgcttgttttctgggatcgcttgcgatactactcacggcagcagttccgggactgcacccgactccttgtggaacaaaaagttcatgcgaagggccaggtgcgggccagattttgtttctgatgttgggtttagcgcttcttgtggttggtgctggtggtatcaggccgtgtaacttggcgttcggtgccgatcagttcaaccccaagtccgaatcaggaaagaaaggaatcaacagtttcttcaactggtacttcttcactttcacgttcgcacagatcatctcgctcacgctagttgtgtatatccagtcgaatgtgagctggaccatcggtttgagtatccccgtgggtctcatgttcttggcttgcgtcattttcttcgctggtcataaactttatgttaaagtgaaagcctcgggcagtcccttggctggtatagctcgtgttatagcagcagcgatctcgaaacgaggattgaagccggtcaagcagccttgggtcgatctttacaatcacattcctcgtaactatgcaaacttgaccctaaaatacaccgaccagttcaggtttctagacaaagcagcgataatgacacctgaggacaagttgaactctgatggaacagcttcggatccatggaaactatgtacgatgcagcaagtggaagaagtgaaatgcattataagagtgattccaatctggtttgcttgcgctatctactaccttgcaataagcattcaaatgacatatcccgtcttccaagcgcaacagagcgacaggagattaggtaccggtggcttcaagatgcccgcagccacctacgtagtgttcttgatgaccggtatgacggttttcatcataatctacgaccgtgtccttgtcccatcgctcaaaagagtgaccggtctagacactggtataacactcttgcaaaggatcggagcgggaatcttctttgcggtgctgagtttattggtctccgggttcatagaggaacgtagaagaagcattgcgctgacaaaacagactctagggatggagcctcgaacaggagagatctcatcaatgtcggccatgtggctgattccgcagctggtgcttgcaggtatagctgaagcatttacagccattggacagatggagttttactacaagcagtttcctgagaacatgaggagctttgctggctctatcttctatgtcggtgcgggggtttctagctacctcgctagcttcttgatctccactgttcataggacaactgaacattcaccttcggggaactggttagctgaggatctgaacaaggcgaagttggattacttctatttcatgctcacgggactcatgttcgttaacatggtttacttcttgataatggctaagttttatagatacaaaggcagtgatgataaagtcatctctgctattgagaccaatgaagacgagaccaagcagaagcaagagaagaactcggtgtaatctgtaaacttttattatttattttcggtcatctaattcagtctcatctttgttgttgtactgtactccgtagaaacaaattaatgaatgtaaaacaagattttgttgcccggcaaaaaaaaaaaaaaa

SEQ ID NO: 1738 - protein, 615 aa, Brassica napus
MERKPFEVETTKTDEDQKPYSAVDGGGSDSVDSFDEDQKKLVYRGWKVMPFIIGNETFEKIGIIGTLSNLLVYLTQVFNLKKYTAATIINAFSGTINFGTFLAAFLCDTYFGRYKTLSVAVVACFLGSLAILLTAAVPGLHPTPCGTKSSCEGPGAGQILFLMLGLALLVVGAGGIRPCNLAFGADQFNPKSESGKKGINSFFNWYFFTFTFAQIISLTLVVYIQSNVSWTIGLSIPVGLMFLACVIFFAGHKLYVKVKASGSPLAGIARVIAAAISKRGLKPVKQPWVDLYNHIPRNYANLTLKYTDQFRFLDKAAIMTPEDKLNSDGTASDPWKLCTMQQVEEVKCIIRVIPIWFACAIYYLAISIQMTYPVFQAQQSDRRLGTGGFKMPAATYVVFLMTGMTVFIIIYDRVLVPSLKRVTGLDTGITLLQRIGAGIFFAVLSLLVSGFIEERRRSIALTKQTLGMEPRTGEISSMSAMWLIPQLVLAGIAEAFTAIGQMEFYYKQFPENMRSFAGSIFYVGAGVSSYLASFLISTVHRTTEHSPSGNWLAEDLNKAKLDYFYFMLTGLMFVNMVYFLIMAKFYRYKGSDDKVISAIETNEDETKQKQEKNSV

SEQ ID NO: 1739 - DNA, 2124 bp, Brassica napus; identical to SEQ ID NO: 1715
  CDS (150)..(1862)

SEQ ID NO: 1740 - protein, 570 aa, Brassica napus; identical to SEQ ID NO: 1716

SEQ ID NO: 1741 - DNA, 1965 bp, Brassica napus; identical to SEQ ID NO: 1717
  CDS (46)..(1797)

SEQ ID NO: 1742 - protein, 583 aa, Brassica napus; identical to SEQ ID NO: 1718

SEQ ID NO: 1743 - DNA, 1917 bp, Brassica napus; identical to SEQ ID NO: 1719
  CDS (14)..(1771)

SEQ ID NO: 1744 - protein, 585 aa, Brassica napus; identical to SEQ ID NO: 1720

SEQ ID NO: 1745 - DNA, 2188 bp, Glycine max
  CDS (139)..(1869)
tttaccatccttgtctgagctctagcttttttctcgaaagcttcctttttgggctatatgttcacaaaaaccatttcccctgaacaccccattcctgtctaaaacacacttctctcaatatctatctctagaactagaatggctgaccatgatgcaaaagaagaacaaaggcccctcaaccaatggagaagaagcaaagggggattcatggcttccatgttcatttttgtcttgtcagcattggacaacatgggctttgtggcaaacatggtaagcatagtcctatacttttatggagtgatgcactttgatctagccagttcagccaacacactcacaaacttcatgggctcaacctacttgctttcccttgttggtggcttcatctcagatacttacttgaacagattcaccacatgcttgcttttcggatcactcgaggttctggctttggcaatgctcacagtccaagctgcttcaaaacatttacaccctgaagcatgtggcaagtcaagctgtgtgaaaggtggcatagcagtgatgttctacacatcactgtgcttgttggcattgggaatgggaggggtgagaggatccatgactgcatttggagctgaccaatttgatgagaaggatccaactgaggcaaaagcccttgcaagttttttcaattggcttttgctcagttcaactgtgggagcaatcacaggagtcactggtgttgtgtgggttagcacacaaaaggcatggcattggggttttttcatcataaccatagcttcctccgttggctttgtgacccttgctcttggtaaacaattctaccgcatcaaaactccaggagatagccccactttgagaattgctcaggttattgttgtgtcttttaagaaccgaaagttgtcattgccggagtcacatggagaactatatgaaatcagtgataaagatgctacagctgagaagattgctcacaccaaccggatgaggttcctagacaaagctgccatcatacaagaaagctcaaaaccccaggcatggaaaatttgcactgtgacacaagttgaagaagtgaagatcctaacaagaatgttacccatagtagctagcaccatcatactgaacacatgtatggcacaactccaaacattctcagttcaacaagggaatgtgatggacctaaaacttggctctctaacagtgccagcaccatccattcctgttatcccacttgtttttataagtgtcctagttcccttgtatgaactattttttgtgccatttgcaagaaaaatcactaaccacccttcaggcataacacaactacaaagggtgggtgtagggttagtactctcggcaatatcaatggcagtggcagggattgtggaagtgaaaagaagggaccaagggagaaaagacccttctaagcctataagcctattttggctttcattccaatatggcatatttggaattgcagatatgttcacccttgtgggactattggagtttttctatagggaatcacctgctagcatgaaatcactttcaacctctctcacgtggttgtcaacatctcttggttacttcttgagcacagtctttgtcaatgttatcaatgctgttaccaaaaggatcacacgaagcaaacaagggtggttgcatgggttcgacttgaaccaaaataaccttaacttgttctattggttcctagccacccttagttgccttaacttctttaactacctttattgggcctcaaggtaccaatacaaacgtgaagactcaggcccaggttttaagcctttaggtgaaatgcctctcaaaagggttgagagaaaacaagattgtgaagttagccgagagtgaagaagagagaatgaatggaagcacaatgggattattagtggatactgaatagaataagcataagaggctgctatgatgtactaagctttgggatgtggaaatagttaattagtggttgaaatctctctactattatggtacatgtttgcttgtatggttggttttttttttgttggctctggaactgtgtgtccagacttcaaaggttttcttttttttaacttgttccttttttttttaatgtaagttgattcacttggttttgtaattggccaatgaccgttaagcgatgttaatttaatagttagtccgacacgca

SEQ ID NO: 1746 - protein, 576 aa, Glycine max
MADHDAKEEQRPLNQWRRSKGGFMASMFIFVLSALDNMGFVANMVSIVLYFYGVMHFDLASSANTLTNFMGSTYLLSLVGGFISDTYLNRFTTCLLFGSLEVLALAMLTVQAASKHLHPEACGKSSCVKGGIAVMFYTSLCLLALGMGGVRGSMTAFGADQFDEKDPTEAKALASFFNWLLLSSTVGAITGVTGVVWVSTQKAWHWGFFIITIASSVGFVTLALGKQFYRIKTPGDSPTLRIAQVIVVSFKNRKLSLPESHGELYEISDKDATAEKIAHTNRMRFLDKAAIIQESSKPQAWKICTVTQVEEVKILTRMLPIVASTIILNTCMAQLQTFSVQQGNVMDLKLGSLTVPAPSIPVIPLVFISVLVPLYELFFVPFARKITNHPSGITQLQRVGVGLVLSAISMAVAGIVEVKRRDQGRKDPSKPISLFWLSFQYGIFGIADMFTLVGLLEFFYRESPASMKSLSTSLTWLSTSLGYFLSTVFVNVINAVTKRITRSKQGWLHGFDLNQNNLNLFYWFLATLSCLNFFNYLYWASRYQYKREDSGPGFKPLGEMPLKRVERKQDCEVSRE

SEQ ID NO: 1747 - DNA, 2131 bp, Glycine max; identical to SEQ ID NO: 1721
  CDS (114)..(1886)

SEQ ID NO: 1748 - protein, 590 aa, Glycine max; identical to SEQ ID NO: 1722

SEQ ID NO: 1749 - DNA, 2029 bp, Glycine max; identical to SEQ ID NO: 1723
  CDS (102)..(1820)

SEQ ID NO: 1750 - protein, 572 aa, Glycine max; identical to SEQ ID NO: 1724

SEQ ID NO: 1751 - DNA, 2389 bp, Triticum aestivum; identical to SEQ ID NO: 1725
  CDS (155)..(1999)

SEQ ID NO: 1752 - protein, 614 aa, Triticum aestivum; identical to SEQ ID NO: 1726

SEQ ID NO: 1753 - DNA, 1927 bp, Linum usitatissimum; identical to SEQ ID NO: 1727
  CDS (20)..(1735)

SEQ ID NO: 1754 - protein, 571 aa, Linum usitatissimum; identical to SEQ ID NO: 1728

SEQ ID NO: 1755 - DNA, 1822 bp, Linum usitatissimum
  CDS (9)..(1763)
aggaaaatatgggcggcgagaatgggaaaacaacggcggtggcgcctctgatccgtaaggagggaacgcccagaaagccaaagggtggcttcagaaccatccccttcatcatattgaatgaagggtttcagtcgttggcaagcacagggctacacgcaaacatggtaatatacttgacgaacgagttccagatgggtgcagtgacatcgagcagcatcatctcactctggtcagctgcttcttcattcatggcagtgtttggcgctgtgctttccgactctttcttaggccggttcacagtcattctcattggttcctctttctcccttctcggaaccattgggttgtggtcaacagcagtggttccggagttaaggccaccaccatgcgagtcgatcaattgcgagactacagctgcgacgccaactcagttagcaatcctgtacgcatctctgggactcatatcccttggatcaggctgccttctgccttgctcaatggcattcggtgctgaccaattggacaagaaagacaacccaaataacgaaagagtgttgcagggcttcttcaactggtactacgccattggcggagttgccactttgcttgggctcaccgtcgtggtgtatattcaggacacctatggatggccagttgggctttcagtgcctgctttcctagtcttgttctctactctcttgtttttgttgccttcctccatttacgttaagcacaaggctagaggcagcttgtttgtgggttgcctcagagttttggtggctgctatctgcaaggctagttctaatagtgttaaagataatggagaacaagaaggagtcaacagtagtgttgggcttcttgaggatttggatgacagtaggcatgactattttcacggccttgatcacaatggcttcatcacccctactcctcatttgaggtgcctgaacaaagcttgcttgattgtgaactcagagacggacataaacccagatgacggttcagcgaaaaacccatggaccttatgcacagtagaagaggtagaagccatgaaatccatagtcaaagtgttacccatttggtcaacaggcttcctattttacctcagcttagctcagtcaccattcatgatcctccaagcagaaaccatgaacagacacatcttctccaactctttcgaattcccgccgggatcacttggttcgttcaacttgataagtttcaccctctccatcatcatctacgactccatactaatccccatcctttccaagttcactgggaacccgcgtggcctcagcaccaacgtccgcctcggagcagggatggtcctggccatcttggccatggccatcttggccatggccatctctggagctgtggagtctatgaggagatggaacgctaccgcagagcaagacgcggtggagatttctgttttttggttgatgccttctcttgttttgctcgggacggctcaggctctgaattacattgagcagatttcgttttactacacccacttgcctaaggcaatgtcaagtattgctgtggccatgctcactttgatgacggccattgggagcttgttggcgagtgcgttgattgatgttgtggatggtttcagttccagtggagggaaggagagctggttgtctactaatcttaacgagggtcacttggattattactatttcctcattgctgggatttgtttcctcaattttctgtatttcttgctctgttccaggactttcaattaacccttgtaaatggggctctgtatttcttgaaaaaaaaaaaaaaaaaaaaaaaaaaaaaa

SEQ ID NO: 1756 - protein, 584 aa, Linum usitatissimum
MGGENGKTTAVAPLIRKEGTPRKPKGGFRTIPFIILNEGFQSLASTGLHANMVIYLTNEFQMGAVTSSSIISLWSAASSFMAVFGAVLSDSFLGRFTVILIGSSFSLLGTIGLWSTAVVPELRPPPCESINCETTAATPTQLAILYASLGLISLGSGCLLPCSMAFGADQLDKKDNPNNERVLQGFFNWYYAIGGVATLLGLTVVVYIQDTYGWPVGLSVPAFLVLFSTLLFLLPSSIYVKHKARGSLFVGCLRVLVAAICKASSNSVKDNGEQEGVNSSVGLLEDLDDSRHDYFHGLDHNGFITPTPHLRCLNKACLIVNSETDINPDDGSAKNPWTLCTVEEVEAMKSIVKVLPIWSTGFLFYLSLAQSPFMILQAETMNRHIFSNSFEFPPGSLGSFNLISFTLSIIIYDSILIPILSKFTGNPRGLSTNVRLGAGMVLAILAMAILAMAISGAVESMRRWNATAEQDAVEISVFWLMPSLVLLGTAQALNYIEQISFYYTHLPKAMSSIAVAMLTLMTAIGSLLASALIDVVDGFSSSGGKESWLSTNLNEGHLDYYYFLIAGICFLNFLYFLLCSRTFN

SEQ ID NO: 1757 - DNA, 2044 bp, Linum usitatissimum
  CDS (92)..(1807)
cggatttccgagttacactcccactcagcagactgatccgtctccattgattccgtttctctttcttccccatccttcaaaggtgctatcgatggctcagaacatcgagcaagatgataactatacgaacgatggaacggttgatattcatggaaacccagctgataagcggaagacaggaaactggagagcttgccgcttcattctggggaacgaatgttgcgagagattggcatactacgggatgagtaccaacctggtgaacttccttcaggaacgtctcaacatggggaatgctaaagcatcaactactgtcaccaactggtcaggaacttgctacgccacaccattaatcggagccttcctggctgatgcctacttaggaagattcaagaccatcacaatttttgtgatggtctacatctgcgggatgacactcctgacaatgtccgcagctattccaggactccgtccatcttgcaacggagattcctgccaggccacatcaagccagaccgctgtatgcttcgtagcgctctacttgattgctctcggaaccggcggaatcaagccgtgcgtttcgtcctttggtgcggatcagtttgacgacaatgacgagtctgagaagaagcaaaagagctccttcttcaactggttctacttctcgatcaacgttggtgctatggtcgcttcctcggtgctggtgtggatacagatgaatgttggttgggactgggggttcgggattccggcagttgccatggccgttgctattgtgttcttctttgcaggaagcaagctgtacagggttcagaaacctggtggaagtcccctgaccaggattttccaggtcattgttgcttctttcagaaaagtgaatgttgaagtcccagatgataagtcgctcctctatgagattgctgattccgaaagctccatccaaggcagccgcaggcttgagcacaccgatgagttcaagttctttgacaaggcagccgtagaaacgagaaccgaggataccaagggcgtaccaaacccatggaaactctgcacagtgacccaagtcgaagagctgaaatccatcatcagactgcttccagtatgggcaagcggcatcatattctcagcagtctatagccaaatgtccacagtgttcgtcctccaaggcaacacgatggaccaacacatcggcccgaaattcaagatcccatcggcatcactctccctcttcgacaccttaagcgtcctgttctgggctcccgtatacgaccgcctaatcgtcccggcagcgagaaacttcactggccacgaacacgggttcacccaactacaaaggatggggatcggactcgtgatctcgaccttcgccatggtagtcgcaggagtactggaagtggctcgtctccagatggtgaggcaccacggctactacgacgtggagacggttccgatgtcgattttctggcaggttccgcagtatttcctggtgggttgtgccgaagtgtttaccttcatcggtcagctcgagttcttctacgatcaggctcctgacgctatgaggagcctctgctcggcgctgtctctggcgacggtggctctggggaactacctgagcactctgctcgtcacggtggtgactgaagtgacgacgaaaggtggaaagcttgggtggattcctgacaacttgaatagaggtcatctggattacttctactggcttctggccattctgagcttggtgaatttcttcatctacctgtggattgctaagtggtattcttataagaagaccagtgggaaggtctgagtagaaaaaggatgatgtggaggatgaacaggctgaaccgtgggtttgatttgtttatggttatgaaccgaaatcttagtgtgttgagtttagtaaagcttgtgattttgtcgtcttttttaggaagggattaagttgcttgtgaatatcattgctgaacttcgtaatttaggatagttcacaacataaatgaataaatgatagttatttgatttcgatatcaaaaaaaaaaaaaaa

SEQ ID NO: 1758 - protein, 571 aa, Linum usitatissimum
MAQNIEQDDNYTNDGTVDIHGNPADKRKTGNWRACRFILGNECCERLAYYGMSTNLVNFLQERLNMGNAKASTTVTNWSGTCYATPLIGAFLADAYLGRFKTITIFVMVYICGMTLLTMSAAIPGLRPSCNGDSCQATSSQTAVCFVALYLIALGTGGIKPCVSSFGADQFDDNDESEKKQKSSFFNWFYFSINVGAMVASSVLVWIQMNVGWDWGFGIPAVAMAVAIVFFFAGSKLYRVQKPGGSPLTRIFQVIVASFRKVNVEVPDDKSLLYEIADSESSIQGSRRLEHTDEFKFFDKAAVETRTEDTKGVPNPWKLCTVTQVEELKSIIRLLPVWASGIIFSAVYSQMSTVFVLQGNTMDQHIGPKFKIPSASLSLFDTLSVLFWAPVYDRLIVPAARNFTGHEHGFTQLQRMGIGLVISTFAMVVAGVLEVARLQMVRHHGYYDVETVPMSIFWQVPQYFLVGCAEVFTFIGQLEFFYDQAPDAMRSLCSALSLATVALGNYLSTLLVTVVTEVTTKGGKLGWIPDNLNRGHLDYFYWLLAILSLVNFFIYLWIAKWYSYKKTSGKV

SEQ ID NO: 1759 - DNA, 1959 bp, Helianthus annuus
  CDS (4)..(1803)
aagatggagccactgaatgagaataataaagatgatgaatccattgagatgtcaaaccaaaagaagcttggtggggtcaagaccttaccctttatccttgcgaatgagatatgtgacagattcgctgcgaccggattccacgccaatctgataacatacttaactgtacaacttaacataccactagtgaaggcatccaataccctgaccaacttcactggactttctagttttacgcctattatcggtgcactagttgctgactcttttgctggtcgctactggaccatcgtcgtcgccttgctcatttacgaactgggcatgatcatcattaccatatcagcattcttgccacaattccatccaccacaatgtcccactcaagtcaactgcaaagaagcatcacaatctcaattatcagtgctttatgtctctctttttttgactgcaatcgggttaggaggcacacggccttctgttgttgcgtttgccgcagatcaacttgatatttcaaagccgaaaaaacaggcaacaagctggaatttcttcaactggtactaccttttattatcactagcaagtttatctgcactgacgctagtcgtctacatccaagatcgggtgagttggggttggggtctcgggattcctaccatcgcaatggtggttgcgtttgtagcgtttttagttggatctccgctttatcagaaagcaaaacccgaaggaagtccgtttgttagagttgctcaagtgattgttgctgcgatcaagaagcgtggtgttgaggtaccggtagatgataaacttctttatgagaacaaagatcttgatgcgggtatttctaaggacgggcagcttgttcatactaatcaattgaggtggtttgatagggctgccattatgacccaagatgatactgtccatctccttacaaactcgccgaaactatggcgaattgctaccgtgcatagagttgaagaactaaaatccatgattagactgttaccatttgtgtcaacgggtatattattcgtaatggcatattcacaccagggtagcttcaccatcatgcaagctcgaaccatggaccgtcacataaccaaaactagctcgtttgaaatacctccagctagcatggcggtctttgatgtcctagccctaattattaccctcgcattatacgaccgtttatttgtcccttttgcatctcgcttcacaaagaaccctgcaggcatcacatgtttacaacggatgggtgttgggttcgctgtaaacatatgtgcaacattggtggggtcgtttgtggagatcaaacgaaaacacgtagcaagagatcataaactgatcgaccagccaacgcaaataatacccataagcgtttattggttggttcctcagtatacgcttcatggtgtagctcaagcattttatcaagttgggaaattggagtttctttatgatcagtcacccgaaagtatgaaaagcaccgcaatggctttatattggattgcaattggattaggacagtatgcagggacattaatggtgacattggtccataagtatagcgcggataaaaacgggagaaattggcttccggataggaatataaataaaggtagattggaatactactacatgcttgtaactgggatacaagtagtaaaccttgtgtattattacatatgtgcctggttctatacttataagccgttagaagaggtcgctaaaagcggtgaagagggagatctagagttggttgtagataacaacatggtagttgatgtaataaacaagtcatgatggaaaagaagccaaggatacatagcattagcgagaatcgtcaatgaacgcgtgtatttaatccgatttctagatgtcaagtattttcattagctttcaaaagtaaaatcaagtaatctgatgtctaatggtttaaactcgaaaaaaaaaaaaaaa

SEQ ID NO: 1760 - protein, 599 aa, Helianthus annuus
MEPLNENNKDDESIEMSNQKKLGGVKTLPFILANEICDRFAATGFHANLITYLTVQLNIPLVKASNTLTNFTGLSSFTPIIGALVADSFAGRYWTIVVALLIYELGMIIITISAFLPQFHPPQCPTQVNCKEASQSQLSVLYVSLFLTAIGLGGTRPSVVAFAADQLDISKPKKQATSWNFFNWYYLLLSLASLSALTLVVYIQDRVSWGWGLGIPTIAMVVAFVAFLVGSPLYQKAKPEGSPFVRVAQVIVAAIKKRGVEVPVDDKLLYENKDLDAGISKDGQLVHTNQLRWFDRAAIMTQDDTVHLLTNSPKLWRIATVHRVEELKSMIRLLPFVSTGILFVMAYSHQGSFTIMQARTMDRHITKTSSFEIPPASMAVFDVLALIITLALYDRLFVPFASRFTKNPAGITCLQRMGVGFAVNICATLVGSFVEIKRKHVARDHKLIDQPTQIIPISVYWLVPQYTLHGVAQAFYQVGKLEFLYDQSPESMKSTAMALYWIAIGLGQYAGTLMVTLVHKYSADKNGRNWLPDRNINKGRLEYYYMLVTGIQVVNLVYYYICAWFYTYKPLEEVAKSGEEGDLELVVDNNMVVDVINKS

SEQ ID NO: 1761 - DNA, 1957 bp, Helianthus annuus
  CDS (34)..(1746)
ccaaagtttcataaagcctagactgaaactaaaatggataatactgacgccggtaccgattactctagagtcaactctccgctactcaacaacttcgttgatggagccgttgactacaaaggccgtccagtcctcagatcaaaatccggttgctggcgatccgcatctttcatcattggtgtggaagtggcagagagatttgcatactatggagtcagttcaaatctgatcacctacttgacgggaccattgggccaatctacagctactgcagctgagaatgtcaacatctggtctggaacgtcgtcgcttcttcccctagttggagctttcatcgcggatgcttatctcggtcgatacctaactgctatacttgcttctctgctctatatcctggcacttgcattgctggctttttcaacatcgattacatctgactgtacaaactccattgatggctcatcatgttcacctcagctccaagttgtcatatttttcattgctttgtatctagtggcatttgcccaatgtggacacaagccatgtgttgaggcatttggggctgaccagtttgatgcagatgatccagaagaactcaaatccaaaagctcattcttcaactggtggtattttggattgtgtgcaggagctacagttgggatctttgttcttagttacattcaagataaccttagttggggtcttggctttgggattccttgtgttatgatgggttttgccctaataatgttcttgtttggaaccgtcacttatcggtttggcgaaaaaacccaagaaaaaaacgcgtttgcgcgaattagccacgtgtttcttactgcggctcggaatcgaagggtcacgtctttagaaatatgtgcagaagaggaagcttctggaataatgcatcatcaagattctcaacagttcagatttctcaacaaagctttggtttcccatgacgggtcaaatgaacatggaaccgtttgtagtgttgatgatgtggaagaagcgaaggcgattcttagacttattccaatatgggtcagctgtttaggttatggaattgtatttgctcaaacttccacattcttcaccaaacaaggatctaccatggaccggttaatcggctcaagctttgagattccacctgccacactacaatctttcactggtctctcgattatgatcctcattcccatctatgacaccattttagtcccttttacccgagcaattacaaagaagccatctggcataacaatgcttcaaagaattggaatcggcattcttatatctattgtttcaatgggtgttgcagcaatcgtcgaaacaaaaagactcaaagttgctcgcgaatatggattactggatgatccagatgcaatgatcccgatgaagatatggtggttattacctcaatatctattggttggagctggtgaagtgtttacaattgtgggtatgcaagaattcttttatgaccaaatgccaagtgatctaaaaagtataggcttggcactttacctaagtgttttggggattggtagctttctgagcggatttataatctggatcgttgagaaaacgactggtggaaatggtcaagatggatggatatctgataacttgaatcatgggcatattgattatttatactaccttcttgctggaattagtgctgtagcatttgtgatgtttgtatattctgcgaaatcttatgtttataatggagaaagaggcaagtgatcttgtttaactatggtgaaattagtgaagatttgttgtaaattaatgttcatagatgcagctggatgtaatggttgcttgaattactgaatgtacttggcttttactacccttttactaataaaagtggatttctagtaaaaaaaaaaaaaaaaaaaaaaaaaaaaaaaaaaaaaaaaaaaaaaaaaaaaaaaaaaaaaaaaaaaaaaaa

SEQ ID NO: 1762 - protein, 570 aa, Helianthus annuus
MDNTDAGTDYSRVNSPLLNNFVDGAVDYKGRPVLRSKSGCWRSASFIIGVEVAERFAYYGVSSNLITYLTGPLGQSTATAAENVNIWSGTSSLLPLVGAFIADAYLGRYLTAILASLLYILALALLAFSTSITSDCTNSIDGSSCSPQLQVVIFFIALYLVAFAQCGHKPCVEAFGADQFDADDPEELKSKSSFFNWWYFGLCAGATVGIFVLSYIQDNLSWGLGFGIPCVMMGFALIMFLFGTVTYRFGEKTQEKNAFARISHVFLTAARNRRVTSLEICAEEEASGIMHHQDSQQFRFLNKALVSHDGSNEHGTVCSVDDVEEAKAILRLIPIWVSCLGYGIVFAQTSTFFTKQGSTMDRLIGSSFEIPPATLQSFTGLSIMILIPIYDTILVPFTRAITKKPSGITMLQRIGIGILISIVSMGVAAIVETKRLKVAREYGLLDDPDAMIPMKIWWLLPQYLLVGAGEVFTIVGMQEFFYDQMPSDLKSIGLALYLSVLGIGSFLSGFIIWIVEKTTGGNGQDGWISDNLNHGHIDYLYYLLAGISAVAFVMFVYSAKSYVYNGERGK

SEQ ID NO: 1763 - DNA, 555 bp, Arabidopsis thaliana; identical to SEQ ID NO: 410
  CDS (1)..(555)

SEQ ID NO: 1764 - protein, 184 aa, Arabidopsis thaliana; identical to SEQ ID NO: 411

SEQ ID NO: 1765 - DNA, 1050 bp, Brassica napus
  CDS (36)..(587)
aacattttgagtcacatcttgcttctgtgtgtgttatgtctggtcttagtgattccattaacaatggacgatatgatggtcaagctggtatgccctctgtctacaggggagtccggaagaggaaatggggcaaatgggtgtctgaaatccgccaaccggggaccaagaaccgtatctggctaggtagcttcgagactcctgaaatggctgcaaccgcctatgacgttgcagcattccatttcaggggacgagaggctcgtctcaacttccctgagctcgtcggcagcctgccacgtcctgcagactcgagctccgacagcattcgcatggcggctcatgaggcagcactctgtctcagaacagagccgctggagtcagacatgcatgtggacacttcaagctcttctaacggaggtccaacgatggtgaggctctcccccagagaaattcaagcgatcaacgagtcaactttggggtctcctaccatgttgatgcattcaacagatgactactcaatggggtttgctaattatatggggatgaatgtttgggatacgtaccatactgactctctttgggacgcttaaaaccagaagagtttcacagctcaatattgagttcataacagcttaagttactagcctagactgcttaagtattagggtttagtttctagaatcaagaacaagggttgttgattctgacgttatagcaaagaataaagtttatctgagttatggagggaaggacacttgtattcttcaaaaggaacagatgagcttgatgggtcccagatatggacctcttcaccaatagtttcaaattaaatagtttgttactaatatgacacatagcttctatttaataagctgtgttaaagattgtgaggtgtgactaattttttattttttatttattttcagttgtttattacctcttttgcttatgcaattcaatatgaattgtagtttagtaacctggatttggtttggtatatgtatggattcctgaaaactatactatatttttttactcaaaaaaaaaaaaaaa

SEQ ID NO: 1766 - protein, 183 aa, Brassica napus
MSGLSDSINNGRYDGQAGMPSVYRGVRKRKWGKWVSEIRQPGTKNRIWLGSFETPEMAATAYDVAAFHFRGREARLNFPELVGSLPRPADSSSDSIRMAAHEAALCLRTEPLESDMHVDTSSSSNGGPTMVRLSPREIQAINESTLGSPTMLMHSTDDYSMGFANYMGMNVWDTYHTDSLWDA

SEQ ID NO: 1767 - DNA, 887 bp, Brassica napus
  CDS (12)..(707)
cccacgtgtcaatgacctcgtcatccatcaaacaaccgtctccggtggaggaggagaaccgccatcacccagatcaagaagaatcccaccgaactaacaacaagaaacgggttagacccgacccgggttatcgaggcgtcaggatgcgtacgtggggcaaatgggtctccgagatccgtgagccacgcaagaagagccgtatctggctcggcactttctccacggcggagatggcagcgcgtgcacacgacgcggctgctctcaccatcaaaggaacctccgctgtcctcaacttcccggagctcgccacttaccttccccgtccagcttcctcctctccccgtgacgtccaagccgcagccgccgtagccgccgccatggatcccaccaccgtcgtcgtctcggagatgcacttgtcttcagtgagtagctactcgacgtctacgatgtcttcattgttgtcaccgtcaagtgaagaagcagcgtcatcgacgacggcggaagaactgagcgagatagtggagttaccgagtcttgagacgagttacgatgagatgtggagcgagttcgtgtacgttgacccggagtatcctcctagttcgccttggtattttaataactcatgtttttattaccacagcgacgaaactggcacttcgatgcctgaaccttttgagtcttccaattttggccccctttttccttagttttctttttttttttctaatgtaatacatcttttaaaactgttcattttagcccaattttcgcagattaatatactcgattaaatatgattttatcaaaaaaaaaaaaaaaaaaaaaaaaaaaaaaaaaaaaaaaaaaaaaaaaaaaaaaaaaaaaaaaaaaaaaaaaaaaaaaaaaaa

SEQ ID NO: 1768 - protein, 231 aa, Brassica napus
MTSSSIKQPSPVEEENRHHPDQEESHRTNNKKRVRPDPGYRGVRMRTWGKWVSEIREPRKKSRIWLGTFSTAEMAARAHDAAALTIKGTSAVLNFPELATYLPRPASSSPRDVQAAAAVAAAMDPTTVVVSEMHLSSVSSYSTSTMSSLLSPSSEEAASSTTAEELSEIVELPSLETSYDEMWSEFVYVDPEYPPSSPWYFNNSCFYYHSDETGTSMPEPFESSNFGPLFP

SEQ ID NO: 1769 - DNA, 648 bp, Glycine max
  CDS (1)..(645)
atgcacatgttagtgaaaaaccacaataagggggatggatctaagtccctcgccgatacactggcgaaatggaaagaatataatgcttggctggagtctaacaatgaagctgagaagccggctaggaaggtccctgccaagggatcaaagaaagggtgtatgaaaggaaaaggagggcccgagaactcacgctgtaactacagaggagttaggcaaaggacttggggaaaatgggttgctgaaatccgagagccaaacagaggaagtaggctctggttgggtacttttcccactgccattagcgctgctctcgcttatgatgaagcagcaagggcaatgtatggttcctgtgcgcgcctcaactttcccaacgttcaagtttcaactttgtctgaggaatcgtcgagaaattctccagctgctgctaaccggtcgagaaattctccagctgctagtcaatccggtcatgcgttgatgatattagagagttctgagtgcatgatattgccgaacaactctggtggagacgcagcagaggatgatgacatggaagacctttccttatccttaagtgtgaaacgtgtgaagcacgaggaaggggaggatgaatcagggaccagttcttcctatctttcattgtcttgatgt

SEQ ID NO: 1770 - protein, 214 aa, Glycine max
MHMLVKNHNKGDGSKSLADTLAKWKEYNAWLESNNEAEKPARKVPAKGSKKGCMKGKGGPENSRCNYRGVRQRTWGKWVAEIREPNRGSRLWLGTFPTAISAALAYDEAARAMYGSCARLNFPNVQVSTLSEESSRNSPAAANRSRNSPAASQSGHALMILESSECMILPNNSGGDAAEDDDMEDLSLSLSVKRVKHEEGEDESGTSSSYLSLS

SEQ ID NO: 1771 - DNA, 1458 bp, Arabidopsis thaliana; identical to SEQ ID NO: 512
  CDS (1)..(1458)

SEQ ID NO: 1772 - protein, 485 aa, Arabidopsis thaliana; identical to SEQ ID NO: 513

SEQ ID NO: 1773 - DNA, 1568 bp, Brassica napus
  CDS (27)..(1448)
tcttcctcggtttttctcctctagaaatgaaaagcttccacactgagtataatccctcggccgtggaagccgccgggaataacttcgacgacgatggtcgggagaagagaacggggacggtgatgacggcaagtgctcacattatcactgctgtgataggttccggagtcttgtccttggcttgggctatagcacaacttggttgggtggcaggaacagtgattttggtaacttttgccgttataaattacttcacatctacaatgcttgccgactgttatcgatctccggacacaggaatacgtaattataattacatggacgttgtcagagcttaccttggtggttggaaagtgaagctatgtggtctggcacagtacgggagtctagtagggatcactattggttacaccatcactgcctccataagcttagtagcgatagggaaagcaaattgttttcatgaaaagggacatggtgcaaaatgttccgtatcgaattatccactcatggcggcgtttggtatcatccagattgttcttagtcagattcataattttcacaagctctcttttctctccattatcgccaccgttatgtccttctcttatgcatccatcggaattggcttggccttggccgctctggcaagtgggaaggttggtaagacggatctgacgggcacggtggttggagtagacgtaactgcgtctgacaaaatatggaggtcgtttcaagcagctggagacattgccttttcgtacgcattttccgttgttctcgttgagattcaggatacactgagatcaagcccaccagagaacaaagtcatgaaaaaagcaagccttgctggagtttcaactacaactggtttctacatcttatgtggctgcatcggatatgctgcttttggaaaccaagcccctggagacttcctaactgactttggtttttatgagccttactggctcattgattttgctaatgcttgcattgctgtccacctaatcgcagcctatcaggtgtttgcacaaccaatattccagtttattgagaagaaatgcaacaaagcgtggccagaaagcaactttatcaccaaagattattcgataaacataccattgctagggaaatgtcgcatcaacttcttcagattggtctggaggtcaacctatgtgattttgacaacagttgcagcaatgatattccccttcttcaacgcgatcttgggccttatcggagcactcacattctggccgctaacagtttacttcccagtggagatgcacatctcgcagaaaaaggttaagaagtatactatgagatggatagggttgaaactccttgtattggtttgtttggttgtttcgctcctagctgcagtaggatccattgtcggcctcataagtagtgtaaaggcatacaagcctttccacaatttagattagttacttgtaacctaagctatttgaatacatagttaataacgaactatgtacgatgagaatatggaagaacgaatggatacatagttaatgacgagctatattagtaaaaaaaaaaaaaaa

SEQ ID NO: 1774 - protein, 473 aa, Brassica napus
MKSFHTEYNPSAVEAAGNNFDDDGREKRTGTVMTASAHIITAVIGSGVLSLAWAIAQLGWVAGTVILVTFAVINYFTSTMLADCYRSPDTGIRNYNYMDVVRAYLGGWKVKLCGLAQYGSLVGITIGYTITASISLVAIGKANCFHEKGHGAKCSVSNYPLMAAFGIIQIVLSQIHNFHKLSFLSIIATVMSFSYASIGIGLALAALASGKVGKTDLTGTVVGVDVTASDKIWRSFQAAGDIAFSYAFSVVLVEIQDTLRSSPPENKVMKKASLAGVSTTTGFYILCGCIGYAAFGNQAPGDFLTDFGFYEPYWLIDFANACIAVHLIAAYQVFAQPIFQFIEKKCNKAWPESNFITKDYSINIPLLGKCRINFFRLVWRSTYVILTTVAAMIFPFFNAILGLIGALTFWPLTVYFPVEMHISQKKVKKYTMRWIGLKLLVLVCLVVSLLAAVGSIVGLISSVKAYKPFHNLD

SEQ ID NO: 1775 - DNA, 1659 bp, Brassica napus
  CDS (73)..(1533)
tctcagtatactttgtacatgtgccaagcttgactgtcaaaagacttgtgtcatttactctcctctcttttcatgtctccctctccccctcttacaatgaaatccttggacactctccataatccctcggcggttgagtccggtaacgccgctgtgaagaacgtcgatggtgatggtcgagagaagagaacggggacgtttctgacggcgagtgcgcacattatcacggcggtgataggctcaggagtgttgtctttggcttgggcattagcacagcttggttgggtggctggaaccatgattttggtgattttcgccatcatcacttactacacgtctactttgctcgccgattgctacagagcgccggaccccatcaccggaacacgcaactacacgtacatggacgtcgttcgagcttaccttggtggtaaaaaggtgcagctatgtggactagcacagtacggaaacctcgttggggtctctattggttacaccatcactgcctccataagcttagtagcgattgggagagcaaattgttttcatgacaagggacatggtgcgaaatgtaccgcatcgaattatccatacatggtggcatttggcggcctccagattcttctaagtcagattcctaattttcacaagctatctttcctctcaatcattgccgcggttatgtccttctcttatgcatctattggtatcggtctggccatcgccaaagtggcaagtgggaaggttggtaagacaacactgacaggtacggtgataggagtggacgtatctgcgtctgaaaaagtgtggaaagcgtttcaagcggttggggatattgcgttttcgtacgcttacaccactattctcattgagatccaggacacattgagatcaagcccaccagagaacaaagtgatgaagaaagcaagccttattggagtctcaaccacaactgttttctacctcttatgtggttgcattgggtatgctgcattcggaaacatagcccctggtgacttccttaccgactttgggttttacgaaccattctggctcgtcattttcgccaatgtttgcattgctgtccatttagtaggtgcctatcaggtatatgttcagccttttttccagtttgttgagagcaaatgtaacaaaaagtggcctgaaagcaatttcatcaacaaagaatactcgttgaagataccattgctcggaaaagttcgtgtcaacttcttcaggctggtgtggaggacaaactatgtgattttgacaacatttattgcaatgatattccccttcttcaactccatcttgggtttgcttggggcacttgcgttctggccgttaacagtttattttcctgtggcaatgcacattgctcagacaaaggttaagaagtattcgggtagatggttggcgctgaacctcctcgtgctggtttgcttgattgtctccgccctagctgctgtgggatccattgttggcctaatcaataatgtcaagaaatacaagcctttcgagagtatagactaagttactttgctgatctattttagataagaactatatgttatttctttccagcaaagtattttagctaaagaataatgttgtaaacgtattatgctattatgttttgttttatgataaaaaaaaaaa

SEQ ID NO: 1776 - protein, 486 aa, Brassica napus
MSPSPPLTMKSLDTLHNPSAVESGNAAVKNVDGDGREKRTGTFLTASAHIITAVIGSGVLSLAWALAQLGWVAGTMILVIFAIITYYTSTLLADCYRAPDPITGTRNYTYMDVVRAYLGGKKVQLCGLAQYGNLVGVSIGYTITASISLVAIGRANCFHDKGHGAKCTASNYPYMVAFGGLQILLSQIPNFHKLSFLSIIAAVMSFSYASIGIGLAIAKVASGKVGKTTLTGTVIGVDVSASEKVWKAFQAVGDIAFSYAYTTILIEIQDTLRSSPPENKVMKKASLIGVSTTTVFYLLCGCIGYAAFGNIAPGDFLTDFGFYEPFWLVIFANVCIAVHLVGAYQVYVQPFFQFVESKCNKKWPESNFINKEYSLKIPLLGKVRVNFFRLVWRTNYVILTTFIAMIFPFFNSILGLLGALAFWPLTVYFPVAMHIAQTKVKKYSGRWLALNLLVLVCLIVSALAAVGSIVGLINNVKKYKPFESID

SEQ ID NO: 1777 - DNA, 1882 bp, Brassica napus
  CDS (220)..(1683)
agcgaagcagacccacagaccttacttctcattttctatgcctcactctctttcaattacagaatcttcagcccagagaaaactgaaacacatccttctttgctgaccgttgatttatttgaaaaatatcattcaacctccctttgattcctttccattcaatttcaagatctaaccgagaaaaaaaaaccaaaaaccctaaactctgtcgggaagaagatggtggagaatttaaagaatgttcaaggattaggtgtctccatggatgttcttcctcgaaacagctccgacttattcgacgaagatggccgtcccaagcgaaccgggacggtgtggacagcaagtgcacatatcattacagcagttattggttctggagtgttgtctctggcatgggctgttgctcagattggttgggtcggtggtccagcagttatgatactcttctctctcgtcacttactacacttctatcctcctctgtacctgttaccgctccggcgactctgtcacgggcaaaagaaactacacttacatggatgctatccactcgaacctcggtggcattaaggtaaaaatatgtggagttgtgcagtatgttaatctttttggtactgcaattggttacactattgcatcagctgtaagcatgatagcaatccaacgaacaagttgccaacaaagcaatggggacaaagatccatgtcatgtcaatggcaatccttacatgattgcgttcggtgttatccaaatcgtattctctcagattccggattttgatcagttatggtggctgtccattgtcgctgcagtcatgtcttttggttactccacagttgggcttggtcttggtatctccaaagtggtagagaacaaagaaattaaaggcactctcactggagtcaccattgggacagtgacatcgagtgggacagtgacacctacccagaaagtctggagaacttttcagtctcttgggaacattgcatttgcctatgcttactccatgattctcatcgagatccaagacacattaaaatcaccacctgcagaggaaaacacaatgaggaaagcgactctcataagtgtagtagtgacaacgcttttctacatgctctgtggctgcgtagggtatgcagcatttggggattcctcaccagggaatctccttgctgctggaggattcagaaacccctattggttgcttgacatagccaatctcgccatagtgatccatctagttggagcttaccaagtctattgccagccactctttgcctttgtggagaaagaagcctccaagaggtatccggagagtaagttcatcacaaacgagaccaagatccacctctttccaggatccaagcctttcaagttgaatctcttcaggctcgtgtggaggacgatctttgtgattacaacaacattgatctctatgctaatgcctttcttcaatgatgtacttggtctcttgggggccattggtttttggcctctaacggtctatttccctgtggagatgtacattgtacagaagaatgtgcggagatggagcacaagatgggtttgtcttcaagtcttaagtctggcttgtcttgttgtgtccgtagccgcggccgcaggatctgtagttgggattgttactgatctcaagagttacagaccttttaagacagatttctgagagcctttgaatcaaataaattcccgcaatagggatccagttatataattggatgttgtaacgtaatcttttaagttagttaagtgttatatatgaaatcttctacccagaacatcggttgagttcgtattcttgttcataatacattagtgaattcaatattggactgcccatgattagtgtcaaaaaaaaaaaaaaa

SEQ ID NO: 1778 - protein, 487 aa, Brassica napus
MVENLKNVQGLGVSMDVLPRNSSDLFDEDGRPKRTGTVWTASAHIITAVIGSGVLSLAWAVAQIGWVGGPAVMILFSLVTYYTSILLCTCYRSGDSVTGKRNYTYMDAIHSNLGGIKVKICGVVQYVNLFGTAIGYTIASAVSMIAIQRTSCQQSNGDKDPCHVNGNPYMIAFGVIQIVFSQIPDFDQLWWLSIVAAVMSFGYSTVGLGLGISKVVENKEIKGTLTGVTIGTVTSSGTVTPTQKVWRTFQSLGNIAFAYAYSMILIEIQDTLKSPPAEENTMRKATLISVVVTTLFYMLCGCVGYAAFGDSSPGNLLAAGGFRNPYWLLDIANLAIVIHLVGAYQVYCQPLFAFVEKEASKRYPESKFITNETKIHLFPGSKPFKLNLFRLVWRTIFVITTTLISMLMPFFNDVLGLLGAIGFWPLTVYFPVEMYIVQKNVRRWSTRWVCLQVLSLACLVVSVAAAAGSVVGIVTDLKSYRPFKTDF

SEQ ID NO: 1779 - DNA, 1743 bp, Brassica napus
  CDS (95)..(1558)
cccatctcctttagttatattttgctcttctttcttttttgttcatagctttgtaataacagtcttatacttctctaagactcaataagaggagatgggtgaaaccgctgccgccaacaaccaccaccaccatcacggccaccaagtctttgacgcatccgtccctcaacaaccagctttcaaatgctttgacgatgatggccgtctcaaaagaaccggtactgtttggaccgcaagtgctcatatcataacagcagtgatcggttcaggcgttctctcattggcatgggctattgctcagcttggatggatcgctggacctgcggtgatgctattgttctcttttgttactctatactcttcaacacttctcagtgactgctacagaaccggagacgcagtcttcggcaagagaaactacacttacatggacgcagttcgatccattctcggtggattcaagttcaagatatgtgggctgattcaatacttgaatctctttggtattgccgtcggatacacaatagcagcatctataagcatgatggcgatcaagagatcgaactgtttccacaagagcggaggaaaagacccgtgtcacatgtcgagcaacccttacatgatcatcttcggtgtgacagagatcttgctctctcaggttcctgacttcgaccagatttggtggatctccatcgtagcagctgtcatgtctttcacttactcagccattggtctagctctagggatcgttcaagttgctgcaaatggagtcttcaaaggaagtctcacgggcataagcatcgggacagtgactcaaacacagaagatatggagaacgtttcaagctcttggagacactgcatttgcctactcatactctgttgtcctaatagagattcaggatactgtaagatccccaccgtcagaatcaacaacgatgaagaaagctacaaaaataagcattgcagtcaccacaatcttctacatgctatgtggttcaatgggctacgcagcctttggagatgcagcaccaggaaacctcctcacgggtttcggattctacaacccgttttggctcctcgacatagctaacgccgccattgtagtccacctcataggagcttaccaagtcttctctcagcccatcttcgccttcgtagaaaaatcagtctcagagaggtttccagacagtgacttgctcaccaaggaactccaaatcaaaatcccagggtttaggtctccatacaaaacaaacgttttcagggtagttttccggtgctgtttcgtcgttctaaccaccgtgatatcaatgctaatgccgttcttcaacgacgtggttgggatcttaggagccttagggttctggcccttgacggtttatttcccggtggagatgtatataaagcagaggaaggtggagaagtggagcacgaggtgggtttgtttacagatgcttagtgttgcttatctagtgatctcggtggtcgccggagttggatcaatcgctggagtaatgcttgatcttaaggtctacaagcccttccagtctacgtattgatgattgatgatggaccaagaacaaaagaaaactggtgtataaagattattgtttatgttatgcctttgaaagaaaaaaactgaacatgtgtataatgtaagtttccatttcgtatgatatctctgtaataaatttataaaatatgttataaaaaccatatgattcgtgcgaaaaaaaaaaaaaaa

SEQ ID NO: 1780 - protein, 487 aa, Brassica napus
MGETAAANNHHHHHGHQVFDASVPQQPAFKCFDDDGRLKRTGTVWTASAHIITAVIGSGVLSLAWAIAQLGWIAGPAVMLLFSFVTLYSSTLLSDCYRTGDAVFGKRNYTYMDAVRSILGGFKFKICGLIQYLNLFGIAVGYTIAASISMMAIKRSNCFHKSGGKDPCHMSSNPYMIIFGVTEILLSQVPDFDQIWWISIVAAVMSFTYSAIGLALGIVQVAANGVFKGSLTGISIGTVTQTQKIWRTFQALGDTAFAYSYSVVLIEIQDTVRSPPSESTTMKKATKISIAVTTIFYMLCGSMGYAAFGDAAPGNLLTGFGFYNPFWLLDIANAAIVVHLIGAYQVFSQPIFAFVEKSVSERFPDSDLLTKELQIKIPGFRSPYKTNVFRVVFRCCFVVLTTVISMLMPFFNDVVGILGALGFWPLTVYFPVEMYIKQRKVEKWSTRWVCLQMLSVAYLVISVVAGVGSIAGVMLDLKVYKPFQSTY

SEQ ID NO: 1781 - DNA, 1726 bp, Triticum aestivum
  CDS (73)..(1536)
agctcccgctagccgctagctagctaatcaaccccaccggcgagacacgcgccagttgccatcgcttccctgatggagaagaagcaggcgagctacgggaagggcgcggccaggatggcgccgatggaggtgtcggtggaggccgggaacggcgccgagtccgactggcttgacgacgacgggcgcccgcgtcggacgggcacggtgtggacggcgagcgcccacatcatcaccgccgtcatcggctcgggcgtcctctcgctggcgtgggccatcgcccagctcggctgggcggcgggccccgccatcatgctcctgttcgcgctcgtcatctactacacctccacgctcctcgccgagtgctaccgctccggcgacccggagaccggcaagcgcaactacacctacatggacgccgtccgctcctacctcccgggcaccaaggtgaagctctgcggcgtcatccagtacgccaacctcgtgggcgtcgccatcggctacaccatcgccgcctccatcagcatgcgggcgatcgggagggcggactgcttccactaccacgacgtcaggggccgcagcgggaaggacgagtgcaagagctccagcaacccctacatgatcgtcttcggggtggtgcagatcctcttctcgcagataccggacttcgaccagatatggtggctctccatcgtcgccgccgtcatgtccttcacctactccaccatcgggctcgggctcggcatcgcgcagaccgtcgccaacggtggcatccagggaagcctcaccggcctcagcgtcggcccgggcgtgacctccatgcagaaggtgtggcgcagcctccaggccttcggcaacatcgccttcgcctactcctactccatcatcctcatcgaaatccaggacacggtgaaggcgccgccgccgtcggaggcgaaggtgatgaagaaggcgacggggataagcgtggcgacgacgacggtattctacatgctgtgcgggtgcatggggtacgcggcgttcggcgacgcggcgcccgacaacctgctcacggggttcggcttctacgagcccttctggctgctggacgtcgccaacgccgccatcgtgctgcacctcgtcggcgcctaccaggtcttctgccagcccctcttcgccttcgtcgagaagtgggcggcggcgaggtggcccgacagcgccttcatcgcccgggagctccgcgtggggccattcgccatcagcgtcttccggctcacctggcgcacggccttcgtctgcctcaccaccgtcgtctccatgctgctccccttcttcggcgacgtcgtggggctcctcggcgccgtcgccttctggccgctcaccgtctacttccccgtcgagatgtacatcgtgcagcgcggcgtgcggcgggggagcacgcggtgggtttgcctcaagatgctcagcgccgcctgcctcgtcgtgtccgtcgccgccgccgccgggtccatagccgacgtcatcggcgagctcaaggagtaccggccgttcagcggctgagcgatatttgtgtaggatggtgggtagcacagcggcacatgggagcacatgtgtacgtacggattgtgtgctgcatggagacggaaacaaattaccattaccaaccttgtgaacttttatcaagtagcacctcgtagatacttgtattttcctcgtaaaagtactctttccctacaaaaaaaaaaaaaaa

SEQ ID NO: 1782 - protein, 487 aa, Triticum aestivum
MEKKQASYGKGAARMAPMEVSVEAGNGAESDWLDDDGRPRRTGTVWTASAHIITAVIGSGVLSLAWAIAQLGWAAGPAIMLLFALVIYYTSTLLAECYRSGDPETGKRNYTYMDAVRSYLPGTKVKLCGVIQYANLVGVAIGYTIAASISMRAIGRADCFHYHDVRGRSGKDECKSSSNPYMIVFGVVQILFSQIPDFDQIWWLSIVAAVMSFTYSTIGLGLGIAQTVANGGIQGSLTGLSVGPGVTSMQKVWRSLQAFGNIAFAYSYSIILIEIQDTVKAPPPSEAKVMKKATGISVATTTVFYMLCGCMGYAAFGDAAPDNLLTGFGFYEPFWLLDVANAAIVLHLVGAYQVFCQPLFAFVEKWAAARWPDSAFIARELRVGPFAISVFRLTWRTAFVCLTTVVSMLLPFFGDVVGLLGAVAFWPLTVYFPVEMYIVQRGVRRGSTRWVCLKMLSAACLVVSVAAAAGSIADVIGELKEYRPFSG

SEQ ID NO: 1783 - DNA, 1781 bp, Glycine max
  CDS (194)..(1570)
ctttctctaatccaaatatctctccgttaatgctctcaccacaaacttcaatagactagccaaaagctaacaccaactataggccaaatcaccaataaatattatttcccgttcctttggcgtgttggccacccactgaacacatttgcactcacacatagaagcagagagaggccattggttggtttcagagatgggaagcatgcacatagaaaccccagaaacttttgctgatggtagcaaaaacttcgatgatgatggacgagctaaaagaactgggacttggattactgcaagtgctcatatcataacggctgtgattggttctggagtgctatctcttgcatgggcaattgcacagatgggttgggtagctggtcctgcagtgctctttgtcttctctttgataacatacttcacctccactcttctcgctgactgttaccgttcacctgaccctgtacatggcaagcgaaactacacatattctgaggttgtcaaagccaacctaggaggaagaaaatttcagctgtgtggattggctcagtatataaatcttgttggtgtaacaatcggctacactataactgcatcacttagtatgggggcggtgaagaagtcgaactgtttacacaaacatggccatcaagacgagtgcaaagttaaggacaacgcttttatgattgcttttgcctgcatccaaattcttctaagccaaataccaaacttccataagctctcttggctctctatcgtagcagctgttatgtcttttgcttattcttccattgggcttggcctttccatagccaaaatcataggtgggggacacgtgcgaacaaccttaacaggggtggaagtttcgggaacggaaaaggtttggaaaatgtttcaagctatcggtgacattgcctttgcttatgctttttctaatgtcctaattgagatccaggacacactgaaatcaagcccacctgagaacaaagtcatgaagagagcaagtttgattggcattatgactacaacattgttttatgtactatgtgggtgcttaggctatgctgcatttggaaatgatgcaccatctaatttcctcacaggattcggcttctatgagcccttttggctaatagactttgccaatgtctgcatagcagtgcacttagttggggcataccaggtctttgtccaacctatatttgggtttgtggaaaagtggagcaaagaaaattggacagaaagccaatttataaatggcgagcatactttgaacattcctctatgtggaagctacaatgtgaacttctttagggtagtgtggaggactgcatatgtgattatcactgccgttgtagctatgttactcccattcttcaatgactttttggcccttatcggtgcactctctttctggccattgacggtttacttccctatagagatgtacattaagaagtcaaatatgcaaagattttccttcacctggacttggctcaagatattgagttgggtttgcttgatcatttctattatctcacttgtgggttccatccaaggccttttcggttagtatcaagaaatacaagcccttccaagcagaacaatagaactttcatacttagtattccaacttgagccaagagtttctattgagggcgacaaaatttgtattactatgttttgaaatagttgttatattttcaattctcgaaatcgagacaacttgttatactaaagtaatataataaaatgtttagtttgctatgttaaaaaaaaaaaaa

SEQ ID NO: 1784 - protein, 458 aa, Glycine max
MGSMHIETPETFADGSKNFDDDGRAKRTGTWITASAHIITAVIGSGVLSLAWAIAQMGWVAGPAVLFVFSLITYFTSTLLADCYRSPDPVHGKRNYTYSEVVKANLGGRKFQLCGLAQYINLVGVTIGYTITASLSMGAVKKSNCLHKHGHQDECKVKDNAFMIAFACIQILLSQIPNFHKLSWLSIVAAVMSFAYSSIGLGLSIAKIIGGGHVRTTLTGVEVSGTEKVWKMFQAIGDIAFAYAFSNVLIEIQDTLKSSPPENKVMKRASLIGIMTTTLFYVLCGCLGYAAFGNDAPSNFLTGFGFYEPFWLIDFANVCIAVHLVGAYQVFVQPIFGFVEKWSKENWTESQFINGEHTLNIPLCGSYNVNFFRVVWRTAYVIITAVVAMLLPFFNDFLALIGALSFWPLTVYFPIEMYIKKSNMQRFSFTWTWLKILSWVCLIISIISLVGSIQGLFG

SEQ ID NO: 1785 - DNA, 1764 bp, Glycine max
  CDS (183)..(1592)
agacagtcggataagggggaagcgagcaatactctcgaatgtcacagataagcattctgctacacataaccaacactgccttctcgtttgagcattatataaactcagtcggtgctcataacttttcctcacacgactctgctcactcatatttatattgaacaaacagagatcccaaatcaatggatattgaagcaggtaaagatattcctgtaagagacccagcgctactcgatgacgacggcagaatcaaaagaaccgggaacgtgttcactgctaccacgcacatagtaacggtggtggtgggtgcaggagtgctggctctggcatgggccatggctcagcttggatggatagctggcatagccgttatgatcctctttgcatgcatttctgtttacacttacaatcttgtagctgattgctacagatttcctgacccagtcagtggcaagagaaactacacttacatgcaggccgttgatgcctaccttggtggaaaaatgcacgtgttctgcggatccgtcctatatgggaagctcgccggggttacagtgggctacactataactagttctgtgagcttggtggctataaagaaagctatttgctttcacaaaaaaggccatgatgcttattgcaagttttcaaacaatccctatatgattggttttgggatttgccaaattttattgtctcaaatcccaaatttccacaagttaacgtggctttcaaccattgctgctgctacctctttcggttatgcattcattggaagcgggctttctctttcggtggtggtctcaggtaaaggagaagcaaccagtatatttggaagcaaagtaggaccagatttatctgaagcggataaagtttggaaggttttcagtgctttgggaaacattgcacttgcttgctcatttgctactgttatttatgacataatggatacattgaagtcctatccaccagaaaacaaacagatgaaaaaggccaatatgttaggaatcacaacaatgacaatacttttcctgctatgcggtggccttggctatgctgctttcggagatgacacgccggggaacatcctcaccggctttggattttacgagccattctggttggtcgcccttggcaatgttttcattgtagtccacatggttggagcatatcaggtgatggctcaaccactatttcgtgtaattgagatgggtgctaacatggcgtggccgcgttcagatttcattaacaagagctatcccatcaaaatgggctccttaacatgtaacatcaacttgtttaggataatttggaggtcaatgtatgtggcagtggccacagttattgccatggctatgccatttttcaatgagtttcttgccttgcttggagcaatagggttttggcctctcattgtcttcttccctgtacaaatgcacattgcacagaaacgggtaaaaagactatcattgaagtggtgttgtcttcaaatattgagcttcgcgtgcttcctagttacagtttccgcggcagttggttcggttcgtggaattagcaagaatataaaaaaaatacaaacttttccagtataaacaatagggcatttggttgcacattccagtgtctcacatttgagaaatgtgaaaatagctatagctaggcagaaaaagaagggagacaagttaattaaaacaaggcagtgaaaattatctgaatgcaaaattatttgtcagctacattattccaaccaaaaaaaaaaaaaaa

SEQ ID NO: 1786 - protein, 469 aa, Glycine max
MDIEAGKDIPVRDPALLDDDGRIKRTGNVFTATTHIVTVVVGAGVLALAWAMAQLGWIAGIAVMILFACISVYTYNLVADCYRFPDPVSGKRNYTYMQAVDAYLGGKMHVFCGSVLYGKLAGVTVGYTITSSVSLVAIKKAICFHKKGHDAYCKFSNNPYMIGFGICQILLSQIPNFHKLTWLSTIAAATSFGYAFIGSGLSLSVVVSGKGEATSIFGSKVGPDLSEADKVWKVFSALGNIALACSFATVIYDIMDTLKSYPPENKQMKKANMLGITTMTILFLLCGGLGYAAFGDDTPGNILTGFGFYEPFWLVALGNVFIVVHMVGAYQVMAQPLFRVIEMGANMAWPRSDFINKSYPIKMGSLTCNINLFRIIWRSMYVAVATVIAMAMPFFNEFLALLGAIGFWPLIVFFPVQMHIAQKRVKRLSLKWCCLQILSFACFLVTVSAAVGSVRGISKNIKKIQTFPV

SEQ ID NO: 1787 - DNA, 1970 bp, Triticum aestivum
  CDS (175)..(1614)
agcgaagacgcctcctggccaagaacacaccacttcccagtcgtcaactagctgctagctaaagcttgcgctgagcttaggtagcacctcacacgcgcctaactcgatcagttctctctacgagaagtcaagctagctgaggattgtcgagtacgtagtagcacaatttaagtgatggcggtaggcaacggcggcgccaagaaagtggtggcgcccatggaggtgtccgtggaggccgggaacgccggggacgcggcgtggatggacgacgacggccggccccgccgctccggcacgttctggacggcgagtgcgcacatcatcaccgccgtcatcggctccggcgtgctctcgctggcctgggccatcgcgcagctcggttgggtggctggcccagctgtcatgctcctcttcgccgccgtcatctactacacctccaccctgctcgccgagtgctaccgcacgggtgatccggccaccgggaagcgcaactacacctacatggacgccgtccgctccaacctcggcggtcccaaggtcatcttctgcggtgtcatccagtacgccaatctcgtcggcgtcgccattggctacaccatcgcctcctccatcagcatgcgggccatcaggagggccgactgtttccacgccaacggacacgcggacccgtgcaagagctccagcaacccatacatgatcctcttcggcctcgtgcagatcgtcttctcgcagatccccgacttcgatcagatatggtggctgtccatcgtcgccgcagtcatgtccttcacctactccggcattggactctccctcggcatcacccagaccatatccaatggtggaatcaagggcagcctcaccggcatcagcatcggcgtcggtatcacggccacacagaaggtgtggcgcagcctgcaggcatttggcgacatcgccttcgcctactccttctccaacatcctcatagaaatccaagacacgatcagggcgccgccgccgtctgaggcgaaggtgatgaagcaggcgacgcggctgagcgtggcgacgacgacggtgttctacatgctgtgcgggtgcatggggtacgcggcgttcggtgacgcagcccccgacaacctcctcaccgggttcggattctacgagcccttctggctgctggacatcgccaacgtggccatcgtcgtgcacctcgtcggcgcctaccaggtcttctgccagcccatcttcgccttcgtcgagcgctgggccgcgtccacatggccagacagcgtcttcatctcccgcgagttccgggtggggccattcgcgctcagcgtgttccggctgacgtggcggtcggccttcgtctgcctcaccaccgtcttcgccatgctgctcccgttcttcggcaacgtggtgggactcctcggcgccgtctccttctggccgctcaccgtctacttccccgtcgagatgtacatcaggcagcgcggcgtgcccggccggagcatgcaggggatctgccttaggatgctcagcgtcggatgcctcatcgtttccatcgccgccgcggcgggctccatcgccaacgtcatcgaagctctcaaagtgtacaagccgttcagcggctgatttgccgcacgtgcaccaacttagttataaccgcatgctatacatacatactacacgttcgccgagaggcccctgttgaacctagttattgcacctaccggattaggcggcctttggttgcatacctcggaaaatgaggggcctaagcagaacggcaggaagttctctttgtaatgaagactaagagcgtagggtgccttatgcaaaatagctccttttttgtcaaggggacctaatttttgttgtacaatctggtgtaccagaggaaaaaaaatccagtatatacacatgaagacaagataaaactttcagatttgctaaaaaaaaaaaaaaaaaaaaaaaaaaaaaaaaaaaaa

SEQ ID NO: 1788 - protein, 479 aa, Triticum aestivum
MAVGNGGAKKVVAPMEVSVEAGNAGDAAWMDDDGRPRRSGTFWTASAHIITAVIGSGVLSLAWAIAQLGWVAGPAVMLLFAAVIYYTSTLLAECYRTGDPATGKRNYTYMDAVRSNLGGPKVIFCGVIQYANLVGVAIGYTIASSISMRAIRRADCFHANGHADPCKSSSNPYMILFGLVQIVFSQIPDFDQIWWLSIVAAVMSFTYSGIGLSLGITQTISNGGIKGSLTGISIGVGITATQKVWRSLQAFGDIAFAYSFSNILIEIQDTIRAPPPSEAKVMKQATRLSVATTTVFYMLCGCMGYAAFGDAAPDNLLTGFGFYEPFWLLDIANVAIVVHLVGAYQVFCQPIFAFVERWAASTWPDSVFISREFRVGPFALSVFRLTWRSAFVCLTTVFAMLLPFFGNVVGLLGAVSFWPLTVYFPVEMYIRQRGVPGRSMQGICLRMLSVGCLIVSIAAAAGSIANVIEALKVYKPFSG

SEQ ID NO: 1789 - DNA, 1698 bp, Linum usitatissimum
  CDS (112)..(1536)
tgaatctcgggatctgaaagctccattgaatctttagaggattctcagaccaagcatttttttgctctgttacactttcaggaacccaaaagagagaaacagaggaaaaagatgatggctgcaaatgaagaattcggctacccggatgtccattcccttgacctggccaaggaatcgctcgacgacgatggtcgtcccaggcggactgggagtgtgtggacggcgagcgcacacataataacggcggtgatcgggtcgggagtgctgtcgttggcatgggcgatggctcagctggggtggatagctggtccggtggttatgattctgttttcgtttgtgacttattatacttcgactctgttggctacctgttaccgtactggagatcctgtcactggaaagaggaattatacttacatggatgctgtcaaatcaaaccttggtgggtctacggtgaaaatttgtggatatgttcagtatgtcaatctgtttggaattgcgattgggtacactatagcatcaaccattagcatgatggcagtgaagaggtcgaactgtcaccacaacaatggagatacaggatcaagatgcgaggtgaatgccaatccattcatggtcggattcggaatcgtggagatatttctgtctcaaatccccgacttcgatcagctatggtggctctccatcgtggccgcagtcatgtccttcacttactccggcatcggactaggccttggcattgccaaagtcggcgaaaacggagaaatcaaaggaacttcgacgggagtcaccgtcggagccataacggagatgcagaaactatggaggtcgttccaggcactcggtaacattgcttttgcatatgcttactccatcatcctcatcgaaatccaggacacggtgaaatctcccccttcagaggtgaagacaatgaagaaagcaacagccataagcgtagcaatcacaagcattttctacattctctgcggcagcttcggctacgcagcgttcggagacttagctccaggaaacctcctgacaggaaagggcttctacgagccgtactggctagtagacatcgccaacgtagcagtcctagtccatctggtaggtgcataccaggtattcgcccagccgattttcgccttcgtggagaaacacgcctccgcaaggtacccacacagccagttcatcaccaaggagatcagagtctcctccaagtacagcctgaacctgttcagactgacctggaggacttcgttcgtgatcctgacgactttgatatcgatgatcctgccgttctttaatgacattgtcgggttgttgggggccgtggggtactggccgctgactgtttacttcccgatcgagatgtacattgcggcgaacaggattccgaagtggagcacgaggtgggttgggttggagattctgagtatggtttgcttgattgttgcgattgctgctgctgttgggtctattgttggggtgattggtgatttgaagtctgtgaaaccgttccatgccgatttctgagctgggggtaaaatggggaatgtaactgaataagactgtaaggagctattaggttttgttcctcctgtgtgtgaagtgtgaaccatgatcattgtcgagtcaagactatgttaagctttaaatgtttactaggttatggttgccgcgaaaaaaaaaaaaaaa

SEQ ID NO: 1790 - protein, 474 aa, Linum usitatissimum
MMAANEEFGYPDVHSLDLAKESLDDDGRPRRTGSVWTASAHIITAVIGSGVLSLAWAMAQLGWIAGPVVMILFSFVTYYTSTLLATCYRTGDPVTGKRNYTYMDAVKSNLGGSTVKICGYVQYVNLFGIAIGYTIASTISMMAVKRSNCHHNNGDTGSRCEVNANPFMVGFGIVEIFLSQIPDFDQLWWLSIVAAVMSFTYSGIGLGLGIAKVGENGEIKGTSTGVTVGAITEMQKLWRSFQALGNIAFAYAYSIILIEIQDTVKSPPSEVKTMKKATAISVAITSIFYILCGSFGYAAFGDLAPGNLLTGKGFYEPYWLVDIANVAVLVHLVGAYQVFAQPIFAFVEKHASARYPHSQFITKEIRVSSKYSLNLFRLTWRTSFVILTTLISMILPFFNDIVGLLGAVGYWPLTVYFPIEMYIAANRIPKWSTRWVGLEILSMVCLIVAIAAAVGSIVGVIGDLKSVKPFHADF

SEQ ID NO: 1791 - DNA, 1812 bp, Arabidopsis thaliana; identical to SEQ ID NO: 673
  CDS (1)..(1812)

SEQ ID NO: 1792 - protein, 603 aa, Arabidopsis thaliana; identical to SEQ ID NO: 674

SEQ ID NO: 1793 - DNA, 2718 bp, Brassica napus
  CDS (103)..(2529)
ctcactgcgaagatctctcttctctttcagatcccattctctcaaataacctctcaactctctgaggaaactctcttctcttccgctaatctcgattcaattatgtcgaacccagctgaatcttcagactcgaaatcgaagaaggattttagtactgctattctggagaggaagaagtctcccaacagacttgtcgtcgatgaggccatcaacgatgataactccgttgtatctctccaccctgctaccatggagaagctccagctcttccgtggtgataccattctcatcaagggtaagaaaaggaaggacactatctgcatcgctcttgctgatgaatcatgtgaggagccgaagatcaggatgaacaaagtggtcaggtctaacttgagggttaggcttggtgatgttatctctgttcatcaatgccctgatgtcaagtacggacagcgtgtgcacatcttgcctgttgatgacaccgttgaaggagtcactggaaacctctttgatgcttacctcaaaccttatttcctggaggcataccgtccggtgcggaagggcgatctcttcctagtgagaggaggaatgaggagtgtggagttcaaggttattgagacggatcctgctgagtactgtgttgttgctccggacactgagattttctgtgagggagagccagtcaagagagaggacgaagagaggcttgatgaagtgggttatgatgatgttggtggtgtcaggaagcagatggctcagattagggagcttgttgagcttcccttgaggcatccacagctgttcaagtcaattggtgttaagccaccgaagggaattttgctttatggaccacctgggtctggaaagactttgatcgctcgtgctgttgctaatgaaactggtgcctttttcttctgtatcaatgggcctgagatcatgtccaagctggctggtgagagtgagagcaacctcaggaaagcgtttgaggaggctgagaagaacgctccttcgatcatattcattgatgagattgactctattgcaccgaaaagagagaagactaatggagaggttgagaggaggattgtgtctcagctccttacgctaatggatggacttaaatctcgtgctcatgttattgtcatgggagcaaccaatcgtcccaacagtatcgacccggctttgagaaggtttggaagatttgatagggagattgatattggtgttcctgatgagattggtcgtcttgaagttctcaggatccacacaaagaacatgaagcttgctgaagatgtggatctagaaaggatctcaaaggacactcacggttatgtcggtgctgatcttgcagctctgtgcactgaagctgccctgcaatgcatcagggagaagatggatgtgattgatttggaagatgactccatagatgctgaaatcctcaattccatggcagtgaccaatgaacacttccacactgctctagggaacagcaacccatctgcacttcgtgaaactgttgtggaggtacccaatgtttcttgggatgacattggaggtcttgagaatgtcaagagagagctccaggagactgttcaatacccggtcgagcacccagagaagtttgagaaattcggtatgtctccgtcaaagggagtccttttctacggtcctcctggatgtggtaaaactcttctggccaaaactatagccaacgagtgccaagcaaacttcatcagtgtcaaaggtcccgagcttctcaccatgtggtttggagagagtgaagctaatgcccgtgaaatctttgacaaggcccgtcagtctgctccatgtgttctcttctttgacgagctcgactccattgcgactcagagaggaggtggaagcggaggtgatggtggcggcgcagcagatagagtcctgaaccagcttttgactgagatggatggaatgaacgccaagaaaaccgtcttcatcatcggggcaaccaacaggcccgacattattgattctgctcttctccgtccaggaaggctcgaccagctcatttacattccactgccagacgaggactcacgtctcaacatcttcaaggcctgcttgaggaagtcacctatcgctaaagatgtggacatcaacgctctcgctaagtacacacagggattcagtggtgctgatatcactgagatttgccagagggcttgcaagtacgccatcagagaaaacatcgagaaggacattgaaaaggagaagaggaggagcgagaacccagaagccatggaggaagatatggatgaagtatcagagatcaaagctgcacacttcgaggagtcgatgaagtatgcacggaggagtgtgagcgatgcagacatcaggaagtaccaagcctttgctcagaccctgcagcagtctagagggtttggttccgagttcaggttcgagactaatgctggttcaggtgcaaccactggagtcgctgatccttttgccacgtctgcagctgctgctgcggacgatgatgatctctacaattagtgatcaagtttatcatactttgttatttaagttttcaatcggattctctctacttctggataccttgtgtttctttaagttattggatttgatacttaataatcttgcttcactcttgttctttggtactaactactaaggtaaatctaaaggacaatcttgattctccaaggcaaaaaaaaaaaaaaa

SEQ ID NO: 1794 - protein, 808 aa, Brassica napus
MSNPAESSDSKSKKDFSTAILERKKSPNRLVVDEAINDDNSVVSLHPATMEKLQLFRGDTILIKGKKRKDTICIALADESCEEPKIRMNKVVRSNLRVRLGDVISVHQCPDVKYGQRVHILPVDDTVEGVTGNLFDAYLKPYFLEAYRPVRKGDLFLVRGGMRSVEFKVIETDPAEYCVVAPDTEIFCEGEPVKREDEERLDEVGYDDVGGVRKQMAQIRELVELPLRHPQLFKSIGVKPPKGILLYGPPGSGKTLIARAVANETGAFFFCINGPEIMSKLAGESESNLRKAFEEAEKNAPSIIFIDEIDSIAPKREKTNGEVERRIVSQLLTLMDGLKSRAHVIVMGATNRPNSIDPALRRFGRFDREIDIGVPDEIGRLEVLRIHTKNMKLAEDVDLERISKDTHGYVGADLAALCTEAALQCIREKMDVIDLEDDSIDAEILNSMAVTNEHFHTALGNSNPSALRETVVEVPNVSWDDIGGLENVKRELQETVQYPVEHPEKFEKFGMSPSKGVLFYGPPGCGKTLLAKTIANECQANFISVKGPELLTMWFGESEANAREIFDKARQSAPCVLFFDELDSIATQRGGGSGGDGGGAADRVLNQLLTEMDGMNAKKTVFIIGATNRPDIIDSALLRPGRLDQLIYIPLPDEDSRLNIFKACLRKSPIAKDVDINALAKYTQGFSGADITEICQRACKYAIRENIEKDIEKEKRRSENPEAMEEDMDEVSEIKAAHFEESMKYARRSVSDADIRKYQAFAQTLQQSRGFGSEFRFETNAGSGATTGVADPFATSAAAAADDDDLYN

SEQ ID NO: 1795 - DNA, 2683 bp, Brassica napus
  CDS (128)..(2560)
cgatctctcttctactctttcagatcccattctcacaatccccaaatccatctctctcagagataaccctaaaagctctcaaactttctgagaaaactctctctcaatcgctaatctcgattccatcatgtcgaacccagctgaatcttcagactcgaaatcgaagaaagacttcagtactgctattctggagaggaagaagtctcctaacagactcgtcgtcgatgaggccatcaacgatgataactccgtcgtctctctccaccctgacaccatggagaagctccagctcttccgtggcgacaccattctcatcaagggaaagaaaaggaaggatactatttgcattgctcttgctgatgagtcatgtgaggagccaaagatcaggatgaacaaagtggttagatctaacttgagggttagacttggagatgttatctctgttcaccagtgccctgatgtcaagtacggacagcgtgtgcatatcttgcctgttgatgataccgttgaaggagtcactgaaaacctctttgatgcttacctcaaaccttatttcttggaggcataccgccccgtgaggaagggagatctcttcctagtcagaggaggaatgaggagtgtggagttcaaggttattgagacggatcctgctgagtactgtgtggtggctccggacactgagattttctgtgagggtgagccagtcaagagagaggacgaagaaaggctagatgaagtgggttatgatgatgttggtggcgtcaggaagcagatggctcagatcagggagcttgttgagcttcccttgaggcatccacagctgttcaagtcgattggtgtgaagccaccgaagggaattcttctttacggaccacctgggtctggaaagactctgattgctcgtgccgtggctaacgaaactggtgcctttttctcctgtatcaatggtcctgagattatgtctaagctggctggtgagagtgagagcaacctcaggaaagcgtttgaggaggctgagaagaacgcgccttcgattatatttattgatgagattgactctattgcaccgaaaagagagaagactaatggagaggttgagaggaggattgtgtctcagctccttacgctgatggatgggcttaaatctcgtgctcatgttattgtcatgggagcaaccaatcgccccaacagtattgatccagctttgagaaggtttggaagatttgatagggagattgatattggtgttcctgacgagattggacgtcttgaagttctcaggatccacacaaagaacatgaagcttgctgaagatgtggatcttgagaggatctcaaaggacacacacggttatgttggtgctgatcttgcagctctgtgcacagaagctgccctgcaatgtatcagggagaagatggatgtgattggtctggaagatgactccatagatgctgaaatcctcaactccatggcagtgaccaatgaacacttccacactgctctcggaaacagcaacccatctgcacttcgtgaaactgttgtggaggttccaaatgtttcttgggatgacattggaggtcttgagaatgtcaagagagagctccaggagactgtccaataccctgtggagcacccagagaagtttgagaagttcggtatgtctccatcaaagggagtccttttctacggtcctcctggatgcggtaaaacccttttggccaaagctatagccaacgagtgccaagccaacttcatcagcgtcaaaggtcctgagcttctcaccatgtggtttggtgagagtgaagcgaacgtccgtgaaatctttgacaaagcacgccagtctgctccatgtgttctcttctttgacgagctcgactccattgccactcagagaggaggtggaggcggaggtgatgccggcggcgcagcggacagagtcctgaaccagcttttgaccgagatggatgggatgaacgctaagaagaccgtcttcatcatcggagcgaccaacagacccgacattatcgactctgctcttcttcgaccaggaaggctcgaccagctcatttacattccgctcccggacgaggactcgcgtctcaatatcttcaaggcctgcttgaggaaatcacccgttgctaaagatgttgacatcaacgctctggctaagtacacgcaggggttcagtggtgctgatatcactgagatttgccagagggcttgcaaatacgccatcagagaaaacattgagaaggacattgaaaaggagaagaggaggagcgagaaccctgaggccatggaggaagatggagtggatgaagtgtctgagatcaaagctgcacactttgaggagtcgatgaagtatgcgcgcaggagtgtgagtgatgcagacatcaggaagtaccaagcgtttgctcagacgctgcagcagtctagagggtttggttctgagttcaggttcgagactaatgctgctggttcaggtgcaaccactggagtcgctgatccttttgccacctcggcagctgctgctgcggacgatgatgatctctacaattagtgtgatcaaatttattatcctttttatttaagttttcaatcggattctctctctactttcaaccttatgtttcttaaaaaagttatcggaattatgttcattgcttcgaaaaaaaaaaaaaaa

SEQ ID NO: 1796 - protein, 810 aa, Brassica napus
MSNPAESSDSKSKKDFSTAILERKKSPNRLVVDEAINDDNSVVSLHPDTMEKLQLFRGDTILIKGKKRKDTICIALADESCEEPKIRMNKVVRSNLRVRLGDVISVHQCPDVKYGQRVHILPVDDTVEGVTENLFDAYLKPYFLEAYRPVRKGDLFLVRGGMRSVEFKVIETDPAEYCVVAPDTEIFCEGEPVKREDEERLDEVGYDDVGGVRKQMAQIRELVELPLRHPQLFKSIGVKPPKGILLYGPPGSGKTLIARAVANETGAFFSCINGPEIMSKLAGESESNLRKAFEEAEKNAPSIIFIDEIDSIAPKREKTNGEVERRIVSQLLTLMDGLKSRAHVIVMGATNRPNSIDPALRRFGRFDREIDIGVPDEIGRLEVLRIHTKNMKLAEDVDLERISKDTHGYVGADLAALCTEAALQCIREKMDVIGLEDDSIDAEILNSMAVTNEHFHTALGNSNPSALRETVVEVPNVSWDDIGGLENVKRELQETVQYPVEHPEKFEKFGMSPSKGVLFYGPPGCGKTLLAKAIANECQANFISVKGPELLTMWFGESEANVREIFDKARQSAPCVLFFDELDSIATQRGGGGGGDAGGAADRVLNQLLTEMDGMNAKKTVFIIGATNRPDIIDSALLRPGRLDQLIYIPLPDEDSRLNIFKACLRKSPVAKDVDINALAKYTQGFSGADITEICQRACKYAIRENIEKDIEKEKRRSENPEAMEEDGVDEVSEIKAAHFEESMKYARRSVSDADIRKYQAFAQTLQQSRGFGSEFRFETNAAGSGATTGVADPFATSAAAAADDDDLYN

SEQ ID NO: 1797 - DNA, 1140 bp, Arabidopsis thaliana; identical to SEQ ID NO: 729
  CDS (1)..(1140)

SEQ ID NO: 1798 - protein, 379 aa, Arabidopsis thaliana; identical to SEQ ID NO: 730

SEQ ID NO: 1799 - DNA, 1364 bp, Brassica napus
  CDS (101)..(1159)
attaaatacaaagagcaccccaaagaagctaatattcgccgtttcgccgcaaagtttgcatttcaacatttaacaccccttaaaagactttaacgccgccatgtgtggaggagctataatctccgaattcatccctccgccgaagtcccgccgcgtcaccagcgagttcatctggccggatctgaaaaatctgaagaagaagtcgaggaagcgatcccatttcttcgatctggacaacgagttcgaggctgatttcaaagggtttaaggatgatgattcgtcttttgagtgtgaagatggattcgatgtgaagccctttgccttcaccgcagctaccaaacccgtagcttcccttcccaccaacgtcgccacgactggttcagtttctgacaagaaagctgtggagtccgatgagaaatctggcaagaggaagagaaagaatcagtacagagggattaggctgcgcccctggggaaaatgggctgctgagatccgtgatcctaaaaaaggctcacgagaatggcttggaacgttcgaaaccgctgaggaagcagcaagagcttatgacgcagctgcgcgcaggatccgtggcgataaagctaaggtgaacttccctgaggaggtgatcagtagtcctaagaagccagtggctaaaccaaaccagaccccagctttggttcagcagccaacgcatgtgagtcagtactgcaacaactcctttgacaacatgggacatgactccttgagtttcatggaagagaagcctcgggtttacaacaatcagttcttcgatgttggacagtatttcggttccgaccaggggagtaactcatttgactgctctgagtttgggtggagtgatcacgcccccaagacaccaccagagaattcttcaatggtagttaacaacaaccaagctacctttgctgaagaaaccattgcagccaagaaggtcaaactcagctctgaggacgagacaagcgacaatgatgatctgatggcgtatcttgacaacgccctgtgggagtctccgttagaagtggaagctatgctcggcgtagatgctgctgctgctgctggtgtggctcaggaagaggcaaacccaatggagctgtggagcttagatgatatcaactttatgctggatggagacttctgaagtgagtgatgggttgcctagtttgtaaataaagctgtgtttgtgtgtgtgtgttggtgagtttcaagcccattgtgaagacaaacagccgtaacttttacttaatcttcagtttggtttttgtgtttgttgtcttgttttgtatccctaagacttgtttaacaagtataataaaaacggtgttggaaccaaaaaaaaaaaaaaa

SEQ ID NO: 1800 - protein, 352 aa, Brassica napus
MCGGAIISEFIPPPKSRRVTSEFIWPDLKNLKKKSRKRSHFFDLDNEFEADFKGFKDDDSSFECEDGFDVKPFAFTAATKPVASLPTNVATTGSVSDKKAVESDEKSGKRKRKNQYRGIRLRPWGKWAAEIRDPKKGSREWLGTFETAEEAARAYDAAARRIRGDKAKVNFPEEVISSPKKPVAKPNQTPALVQQPTHVSQYCNNSFDNMGHDSLSFMEEKPRVYNNQFFDVGQYFGSDQGSNSFDCSEFGWSDHAPKTPPENSSMVVNNNQATFAEETIAAKKVKLSSEDETSDNDDLMAYLDNALWESPLEVEAMLGVDAAAAAGVAQEEANPMELWSLDDINFMLDGDF

SEQ ID NO: 1801 - DNA, 1406 bp, Brassica napus
  CDS (73)..(1212)
aagagaaccccaaagaagctaaaacttaccgttttcgccgctaagtttacattttgagcatttaacaccgccatgtgtggaggagctataatctccgagttcatacctccgtcgaggtcccgccgcgtcacgagcgagcatctctggccggatctgaagaacaaagggaaagcttcgaagaagaagcgatccggtttcatcgatctggacgatgagttcgaggctgactttcaagggtttaaggacgatgcatcgttcgattgcgaagatgaattcgatgtggatgatgacgtcttcgccgatgtcaaaccctttgtcttcgccgcaggtgccaagcccgtagcttcccctcccgccgccttggcttccactggttcagtctctgggaagaaaaccatagagtctggtggacaagctgagaagtctgctaagagaaagaggaagaatcagtacagggggattaggcagcgcccttggggcaaatgggctgctgagatccgtgatcccagaaaaggctcccgggagtggcttggaacattcgacaccgctgaggaagcagcaagagcttatgatgcagctgcacgcaggatccgcggcaataaagctaaggtgaacttcccagaggagatggtccctagcgtctcccagaaacgccctgctgctaagaaggcagtggctaaaccaaaccaaagcccagcatccgttcagcagccaacacatgtgagtcagtactgcaacaactcctttgacaacatgggacatgactcctcctttggtgatgtgagtttcatggaagagaagcctcagatgtgtaacaatcagttctttgatgtcggaggcaacaatggataccagtatttcagttctgaccagggcagtaactcactggactgctctgagtttgggtggagtgatcaaacccccaagacacctgagatctcttcaatgctagtcaacaataaccaagctcctttcattgaagaaaccaatccagccaagaagctcaaaaccagctctgaggacgggacaagcaacaatgatagttctgatgatctgatggcatacctgaacaacgccttgtgggagtctccattggaagtggaagctatgttcggtggtgatgctgctactatgactcaggaagagggaaacccaatggacctatggagcttagatgatatcaactccatgctggatggtggagtcttctgaaagtgattgatgggttgcctagtttgtaaataaagctctttgtgtgttggtgtgtttcaagttcattggtgaagacaaacagccttagctttggttttacttaaacttcggtttggtttttgtgtgttgttgtctcacagggttttgctgttggcgggggaatggtacaagttcataccaaaaaaaaaaaaaaa

SEQ ID NO: 1802 - protein, 379 aa, Brassica napus
MCGGAIISEFIPPSRSRRVTSEHLWPDLKNKGKASKKKRSGFIDLDDEFEADFQGFKDDASFDCEDEFDVDDDVFADVKPFVFAAGAKPVASPPAALASTGSVSGKKTIESGGQAEKSAKRKRKNQYRGIRQRPWGKWAAEIRDPRKGSREWLGTFDTAEEAARAYDAAARRIRGNKAKVNFPEEMVPSVSQKRPAAKKAVAKPNQSPASVQQPTHVSQYCNNSFDNMGHDSSFGDVSFMEEKPQMCNNQFFDVGGNNGYQYFSSDQGSNSLDCSEFGWSDQTPKTPEISSMLVNNNQAPFIEETNPAKKLKTSSEDGTSNNDSSDDLMAYLNNALWESPLEVEAMFGGDAATMTQEEGNPMDLWSLDDINSMLDGGVF

SEQ ID NO: 1803 - DNA, 1256 bp, Brassica napus
  CDS (95)..(1048)
agagagagagaaaacaaaaattaaacccgaagaatctattattctacattttcgccgctaagattctgtttctgaacatttacaccctcacgccatgtgtggaggagcaataatctccgatttcatcccgccgccgaggtctcgccgcgtcaccagcgagtttctctggccggatctgaagaagagctcgaagaaacgctcgagtttcttcgatcttgacgatgagttcgaggctgacttccagggcttcaaggatgattcctctatcgattgcgatgatgcgaagccgttcgttttcgccggggctcgtaagcccgccgtatccgccgccactgccgattcagtgtttggcaagaaagttgttgatggagaaggtgagaggtctgcaaagaggaagaggaagagccagtaccgagggataaggcaacgtccttggggcaaatgggctgctgagattcgtgatccaagggaaggttcaagagtttggcttggaactttcaaaaccgccgaggaagctgcaagagcttacgacgctgcagctcgtagaatccgtggttccaaagctaaggtgaatttccctgaggagaaggagaacccacctgccaagaaggtggctccaaacccaagtccagttttggctcagaacttggacaactcctttgacaacatgtgtttcatggaggagaagcaccaagttaacaacaacaacaatcagtttggtggtaatggatatcatcagtatttcagctcagaccagggtagtaactcattcggttgttctgagtttggttggaacgatcaagctcctataactcctgagatctcctctgcttttatcaacaacaactctgtcacattcgccgaggaagctgatccagctaagcagctcaaggtcatggattttgagacaacttacaacagcactgaatgggattcttcacttgatttcttcagtggagacgctgtggcgactcaggacaatggtgcaaatcctatggagctatggagcattgatgagatcaattccatgattggaggagtcttctaaagagatccattgtcatttaaagagttttaaaaacattttgaactctttcttgttgtcttttgtgttttggttttgttactttgtgcccctaaacatcttctttaacattgtcataagttaatatgttgaaccattgttctcttttgtgatatggaatgctactaaggaaccggtacgaatcgaaccggttaggaaaaaaaaaaaaaaa

SEQ ID NO: 1804 - protein, 317 aa, Brassica napus
MCGGAIISDFIPPPRSRRVTSEFLWPDLKKSSKKRSSFFDLDDEFEADFQGFKDDSSIDCDDAKPFVFAGARKPAVSAATADSVFGKKVVDGEGERSAKRKRKSQYRGIRQRPWGKWAAEIRDPREGSRVWLGTFKTAEEAARAYDAAARRIRGSKAKVNFPEEKENPPAKKVAPNPSPVLAQNLDNSFDNMCFMEEKHQVNNNNNQFGGNGYHQYFSSDQGSNSFGCSEFGWNDQAPITPEISSAFINNNSVTFAEEADPAKQLKVMDFETTYNSTEWDSSLDFFSGDAVATQDNGANPMELWSIDEINSMIGGVF

SEQ ID NO: 1805 - DNA, 1506 bp, Arabidopsis thaliana; identical to SEQ ID NO: 813
  CDS (1)..(1506)

SEQ ID NO: 1806 - protein, 501 aa, Arabidopsis thaliana; identical to SEQ ID NO: 814

SEQ ID NO: 1807 - DNA, 1579 bp, Brassica napus
  CDS (42)..(1427)
cgtttcacagagaagagaaaaagcttcagcaatagccaacaatggtgatcgcaagaacattgtcttcagtctcagcaactgtgatcataattctaacactctttgtccatgtaaatggagttcaagatacaaaggagttgagacctgatcagagctcaagaaatacatcaatgactgattatgaatggcatgaacacgccgtaaaagacccagaagaaatagcagccatggtcgatatgaagatacgaaacagtacagaacgtaggaggttaggctacttctcctgctcaaccggaaacccaatcgacgattgttggcgttgcgataaaaaatggcatcgccagagaaagcgtctagcgagttgcgccatcggattcggacgtaacgccgtcggaggccgagacggacgtttctacgtcgtcacagacccatcggatcatgatccggttaaacctaaactcggtacgctccggtacgcagtgatacaagaccgaccgctatggatcgtcttcaaacgcgacatggtcatcaccctaagtcaagagctcatcatgaatagcttcaaaacgatcgatggtcgcggcgtgaacgtgcacatcgctggtggagcatgtattacgattcagtacgtgacgaacatcatcattcacgggattaacattcacgactgtaagcgtactggtaacgccatggttagaagctcggagacgcattatggttggagaacgatggcggatggcgatgggatctcgatttttgggtcgagccatatttggattgatcataattctatgtcgaactgtgctgatggattgatcgatgcaattatgggatctactgctattaccatttcgaataactatttcactcaccacaacgaggctattttgttggggcataccgattcctacaccagagacaaaatgatgcaagtgaccattgcatataatcattttggggagggtcttatacagagaatgccaaggtttttcatctttgatttcctcctattggttaattggtatcagaattttgtagagttcttgaaactttggtgctatttcaggtgcaggcatggatacttccatgtggtaaacaacgattacactcactgggaaatgtatgcaatcggtggaagtgcaaaccctacaatcaacagtcaaggaaatcgattccttgccccgggaaaccgttttgctaaagaggtgacaaagagggtaggtgcagggaaaggagaatggaaccagtggaactggagatcacaaggagacttattgctcaatggtgcttacttcacttcatctggagctggagcttcttcaagctacgctagagcctctagtttggctgctaaatcatcttcccttgtaggtatgcttacctatagctctggtgccctgaaatgcaggatcggtacaccttgttaatcatttgtataactttggaacaaaagctgaacacatagaaacgatatgaaatgggaaagaacaaagaaaaagaactcgtttttcttcattcccatgttttgactccaagttgtagtatagtacgatgctttcttctcaaaaaaaaaaaaaaa

SEQ ID NO: 1808 - protein, 461 aa, Brassica napus
MVIARTLSSVSATVIIILTLFVHVNGVQDTKELRPDQSSRNTSMTDYEWHEHAVKDPEEIAAMVDMKIRNSTERRRLGYFSCSTGNPIDDCWRCDKKWHRQRKRLASCAIGFGRNAVGGRDGRFYVVTDPSDHDPVKPKLGTLRYAVIQDRPLWIVFKRDMVITLSQELIMNSFKTIDGRGVNVHIAGGACITIQYVTNIIIHGINIHDCKRTGNAMVRSSETHYGWRTMADGDGISIFGSSHIWIDHNSMSNCADGLIDAIMGSTAITISNNYFTHHNEAILLGHTDSYTRDKMMQVTIAYNHFGEGLIQRMPRFFIFDFLLLVNWYQNFVEFLKLWCYFRCRHGYFHVVNNDYTHWEMYAIGGSANPTINSQGNRFLAPGNRFAKEVTKRVGAGKGEWNQWNWRSQGDLLLNGAYFTSSGAGASSSYARASSLAAKSSSLVGMLTYSSGALKCRIGTPC

SEQ ID NO: 1809 - DNA, 1702 bp, Brassica napus
  CDS (88)..(1467)
cccgatctgaaaaccacaaactctccttgtggttttcaccgggaaaaaatcttagctgcttttatctctctctctctctatttgcaaatggcagcagcgtttttgaatattggcagctacgttttcgtcttgttcttatcgtcattagccacattagcaccacaggttcaagccaatattgccgtcttcgacgactactggacgcagcgtcaaggcgatgcgttgaaacaaactttggcctctttcgatccttatcctcttaacgtcaccaaccacttgaattaccatgtcgctttagcacttgacaccacggaatcaatcaacagcacaagaagagagctttcacaggcgagacgtggtcgtaaaatgcaaaacagaagaggaaaatgcgtagctcataacccgatagacaaatgctggagatgcgaccgtgattgggaaaagaaccgtaagaaactagcggtctgtgccctcggattcggcaggagaaccagcggaggaaaagacggaccgatctacgtagtcaccgatgcctcagacgacgaacttatcagccctaggccaggaacattaagacacgcggtgacacgagaaggaccgctttggatcatcttcgcaagaagcatggtcataaaactgcaacaggaactgatgatgacgagcgataaaacgatcgatggacgtggagctagggtgtacatcatgggaggttctggattaacgctgcagtttgtgaataatgtgatcgtacacaatatctatatcaagcagattgttcccgcgaacggcggtttgatcagagactccgagcaacatatagggctcaggacaagaagtgatggtgatggaatcaatttgtttggagcaactaatgtttggatcgatcatgtctcgatgacgagatgttctgatggtatgattgatgcgattctaggatccactgcagtgactgtctccaacagccacttcacagaccaccaagaggtgatgctttttggggccaatgacaaacacgagatcgacaagaagatgcagataacagttgcattcaaccactttggtaagagactggaacagagaatgccccgggtcagattcggaacgatacatgtggtgaacaatgactacacacattgggaaatgtatgcaattggtggaaacatgaaccctacaatcattagtcatggcaaccgtttcattgctcctcctaacgaacaagccaaacagatcacaaagagagagtacacttcttacgttgattggaaactttggaactggcaatcagaaggagattacttcctgaatggagcttactttgtgcaatccggtaaacctaatgcgtggagccctaaaccgaagaaccctatcccgaacaagtttgcgatccgacctaagccgggaacgatggtccgtatactcaccatggacgcaggagtactgggctgcaaacaaggtcaagcctgctgatgattaaaattaccattttgttgccttccaacaaacaaagcttgtgctccctgtatttgcttgttgtccaagaaaagagagagagagagagagaggggaaaaaaggaaatgaaagtgggcttttctatgattggggttttgtaatattattcttattaggattcagtttcctctatgtacaattttcccccatatattttcatattttcactaaaaaaagaaaaaaaaaaaaaaa

SEQ ID NO: 1810 - protein, 459 aa, Brassica napus
MAAAFLNIGSYVFVLFLSSLATLAPQVQANIAVFDDYWTQRQGDALKQTLASFDPYPLNVTNHLNYHVALALDTTESINSTRRELSQARRGRKMQNRRGKCVAHNPIDKCWRCDRDWEKNRKKLAVCALGFGRRTSGGKDGPIYVVTDASDDELISPRPGTLRHAVTREGPLWIIFARSMVIKLQQELMMTSDKTIDGRGARVYIMGGSGLTLQFVNNVIVHNIYIKQIVPANGGLIRDSEQHIGLRTRSDGDGINLFGATNVWIDHVSMTRCSDGMIDAILGSTAVTVSNSHFTDHQEVMLFGANDKHEIDKKMQITVAFNHFGKRLEQRMPRVRFGTIHVVNNDYTHWEMYAIGGNMNPTIISHGNRFIAPPNEQAKQITKREYTSYVDWKLWNWQSEGDYFLNGAYFVQSGKPNAWSPKPKNPIPNKFAIRPKPGTMVRILTMDAGVLGCKQGQAC

SEQ ID NO: 1811 - DNA, 1400 bp, Brassica napus
  CDS (35)..(1198)
ttacttaaccttttgctaagacaagaaaataataatgtctattgtacgtataattttcttgtttctcttaaccacttcttccgcgtttgcgtctgcgtttcctaaaccggcacccgtaccgcaatggtcaacatcagagacatcaaactcaacagcttcttgctcagcaactggaaatccaatcgatgactgctggagatgcgacaagaagtggaaatccaaccgcaagagcctcgcggactgcgcggttggattcggacgcgactcggtaggcggtagagcaggggagttctacaccgtgaccgattcaggagacgaggatcctctaaacccatctccaggtacattacgttacgccgcaacacaagaccaacctctatggatcatattcgatagagacatggtaataacactaaaagaagatattcaagtgacttcatacaaaaccatagacggtagaggaaataacgtgcagatagcttatggaccgtgtttagctttgtatcaagtaagtaacgttatcatacacaatatttacattcaccattgtgttccggcgaaacggtcgttgggaggctattctgatggagatgggatctcgatattcgagtcacgagatgtttggattgatcattgtacgttagagaagtgtcacgatgggcttattgatgcggtgggtgggtcaacggatataacgatatcgaataactacatgttgaatcataacgaagtcatgcttttaggtcatagtgatgagtttgtcggtgatcgtgatatgagggtttcgatcgcctttaattattttggtgaaggacttgtccagcgaatgcctaggtgtaggcatggattttttcacattgtgaataatatttatagagagtgggagatgtatgcaattggtggaagtgctaatccaaccatttttagtcaaggaaatgttttcatagcttcggataatcaattcacaaaggaggttacaaagcgagagagtgtagatggagacgatgaatggaaggaatggaattggaaatcagaaggagatgaaatgctaaacggtgctttctttacaccatcagggaacgaggattctcctagctatacaaaaatgtcgagtatggtagctcggccagcttcacttcttaagactacacatccatcagtaggtgttcttagttgccaaattgaccaaccttgttagaacacattcatcagcttgtaaccaaatattgtattgtcctcttattcttgttgtggttattattagagcattataggatttgtattgaatatgtgatgatcatagaggcagagccaaacaaaacaattgcatagctcattgtcaagttcaccagaatgtttcaattaaaagtcactgagatttcaccaaaaaaaaaaaaaaa

SEQ ID NO: 1812 - protein, 387 aa, Brassica napus
MSIVRIIFLFLLTTSSAFASAFPKPAPVPQWSTSETSNSTASCSATGNPIDDCWRCDKKWKSNRKSLADCAVGFGRDSVGGRAGEFYTVTDSGDEDPLNPSPGTLRYAATQDQPLWIIFDRDMVITLKEDIQVTSYKTIDGRGNNVQIAYGPCLALYQVSNVIIHNIYIHHCVPAKRSLGGYSDGDGISIFESRDVWIDHCTLEKCHDGLIDAVGGSTDITISNNYMLNHNEVMLLGHSDEFVGDRDMRVSIAFNYFGEGLVQRMPRCRHGFFHIVNNIYREWEMYAIGGSANPTIFSQGNVFIASDNQFTKEVTKRESVDGDDEWKEWNWKSEGDEMLNGAFFTPSGNEDSPSYTKMSSMVARPASLLKTTHPSVGVLSCQIDQPC

SEQ ID NO: 1813 - DNA, 1600 bp, Brassica napus
  CDS (75)..(1295)
ttgtttccctcttctctcacttaaatccaagagagtgagtaagttggtctgtactgaaaacagagagaagaaaaatgcagacgaagaagctctttatctctatagtctcctttcttctctatgctccattgatcttctcttcaccagttccagacccagaagccatcgtcgaagaagttcacaagagcattaacgcatcggtcgcagcacggaggaagctaggctacctctcctgcacaaccggcaacccaatcgacgactgctggcgctgcgacccgcattgggagacccaccgccaacgcctcgccgactgcgccatcgggttcggcaaaaacgccatcggaggccgcgacggtcgcatctacgtcgtcaccgactcaggcaacgacgacccggtgacccccaagcccggaactttacgccacgccgtggtccaggacgagcctctctggatcatcttccagcgagacatgaccatccgcctcaaagaggagctcatcatgaactctttcaagaccatcgacggccgcggcgcctccgtgcacatcgccggcggaccttgcgtgacgatccagtacgtgacgaacatcatcatccacggggttcatatccacgactgcaagcgaggcgggaacgctatggtgcggagctcgccgaggcactacgggtggagaacggtgtctgacggcgacggtgtgtctatcttcggagggagtcatgtctgggttgatcactgctcgttgtctaactgtgaagatgggcttattgatgcgataatgggctcgacggcgattactttgtctaataattacatgacgcatcatgataaggtcattttgcttgggcatagtgatacttacgctcgtgacaagaacatgcagattactattgcttttaatcattttggtgaagggcttgttcaaagaatgccgaggtgtagacatgggtacttccatgtggtgaacaatgactatacacattgggagatgtatgcgattggtggaagtgctaatcctactatcaatagtcaagggaacagatttgtggccccgaatattagattcagcaaagaagtgaccaagcatgaggatgcgccagagagcgagtggaagaggtggaactggagatcatctggtgatttgttgttaaacggtgcgttttttactccgtccggtggtgctcagtcgtctagctatgctaaggcatcgagtcttggggcgaaaccgtcttctcttgttggaccgttgacggtgggttctggtgcactgaattgccgcaagggttctcgttgctgattgtggtggtcacttaaggttttttagcttaattagtatagaaaaggcaattaaagccaccaattaagggagttaagttataactttctgtagtcctaaatttactctcttttatgattttacttctttatggggtaaaattaaggagaatacaacctctggctttactgctctttaggacccttgtaaggattctctgttttaaggaatctattattaggaggttgaagtgtaggaacaagtgcagatgtgttgatctttgatattaatataatttatgtttttcttgcaaaaaaaaaaaaaaa

SEQ ID NO: 1814 - protein, 406 aa, Brassica napus
MQTKKLFISIVSFLLYAPLIFSSPVPDPEAIVEEVHKSINASVAARRKLGYLSCTTGNPIDDCWRCDPHWETHRQRLADCAIGFGKNAIGGRDGRIYVVTDSGNDDPVTPKPGTLRHAVVQDEPLWIIFQRDMTIRLKEELIMNSFKTIDGRGASVHIAGGPCVTIQYVTNIIIHGVHIHDCKRGGNAMVRSSPRHYGWRTVSDGDGVSIFGGSHVWVDHCSLSNCEDGLIDAIMGSTAITLSNNYMTHHDKVILLGHSDTYARDKNMQITIAFNHFGEGLVQRMPRCRHGYFHVVNNDYTHWEMYAIGGSANPTINSQGNRFVAPNIRFSKEVTKHEDAPESEWKRWNWRSSGDLLLNGAFFTPSGGAQSSSYAKASSLGAKPSSLVGPLTVGSGALNCRKGSRC

SEQ ID NO: 1815 - DNA, 1845 bp, Brassica napus
  CDS (14)..(1369)
agaagcttcttcaatggcgtcgtcgtctcagaaagtgacctctgtttgtttgaccgtcctcgtcctcttagctctcagtgcaacgattctccggaaaattgaaatccctagctccaggaaggtgaaaacagaggagttgcagagctcaaaaaacacctcaacaatggcggcgaacaggcttgaaggtgtggagttgaatgaacagcacgcggttgatgatccagataaagttgctgatgaagtctctacccttgttcagatgagcgaacataacatcacagcaaggaggaagcttggatttttctcatgtggaaccggtaacccgatcgatgactgttggcgttgtgaccgtaactggcataagaaccgcaaacgcctggccgattgtgggatcggttttggacgcaacgctgttggtggtcgtgatggacgcttctacgttgtcactgaccccactgatgaagacgttattaaccccaaaccaggaactcttcgccacgcggttatccaagatgagcctctatggattgtgttcaagagagatatggtgatagagctgaaacaagagctgattatgaacagtttcaagaccattgatggtcgtggtgctaatgtccatatagctaacggtgcttgcatcaccctccagtttatcaccaacgtcatcatccatggtcttcacattcatgattgcaagcctactggaaacgccatggttagaagctcgccatctcattttggctggaggacaatggctgatggtgatgcagtctctatctttcagtcatctcatatctggattgatcataactctctctctcactgtgctgatggccttgtggatgctgtcatgggttctactgctattaccgtttccaataatcactttacacaccacaatgaggtcatgttgctcggccacagtgattcctacacaatagacaagctgatgcaagtgaccattgcttacaaccattttggagaaggattggttcagagaatgccaaggtgcagacatgggtatttccatgtggtcaacaacgactacacacactgggagatgtacgcaattggtgggagtgcagatccaaccataaacagtcaaggaaacagatatgctgctcctaagaaccctttcgccaaagaggtgacgaaaagagtagagacagatgcaagtgaatggcagaagtggaattggagatcagaaggagatctgctactgaatggagcattcttcaaggcatcaggagcagaagcctcagctagctatggacgagcctcaagcttagcagctaaaccatcatcaatggtccacaccataacctctactgcaggagcactaggttgccgcagaggcagaccttgttagttctctctataccacccgtagtaactaaccaaccctaaaccctttccccatatctatggaaagtggaatatatagtagtctttctgctttctcgtttcgttgtggtcgtatcattgtttcggcagatcccgctcagttttcttacgggtggtaggaattggtcaacctcagcttgctttttctttaaaaatggtgttgggggaaacaaagaggagcaagctcagaagcgttgttcaaaaggttttccttctttttagagtctcttatggttttgttttttttcccctctttggttttggagttgttgaagtccctttggttttactggatctcactcccttgcgtctgtagtctttttgggttttctctttcaagttagtggtcatagtaaagcaaaatttgtaacagaagacgattgaaaagctttcttgattttattgcaacttccgttgtcttttaagaaaaaaaaaaaaaaa

SEQ ID NO: 1816 - protein, 451 aa, Brassica napus
MASSSQKVTSVCLTVLVLLALSATILRKIEIPSSRKVKTEELQSSKNTSTMAANRLEGVELNEQHAVDDPDKVADEVSTLVQMSEHNITARRKLGFFSCGTGNPIDDCWRCDRNWHKNRKRLADCGIGFGRNAVGGRDGRFYVVTDPTDEDVINPKPGTLRHAVIQDEPLWIVFKRDMVIELKQELIMNSFKTIDGRGANVHIANGACITLQFITNVIIHGLHIHDCKPTGNAMVRSSPSHFGWRTMADGDAVSIFQSSHIWIDHNSLSHCADGLVDAVMGSTAITVSNNHFTHHNEVMLLGHSDSYTIDKLMQVTIAYNHFGEGLVQRMPRCRHGYFHVVNNDYTHWEMYAIGGSADPTINSQGNRYAAPKNPFAKEVTKRVETDASEWQKWNWRSEGDLLLNGAFFKASGAEASASYGRASSLAAKPSSMVHTITSTAGALGCRRGRPC

SEQ ID NO: 1817 - DNA, 1559 bp, Glycine max
  CDS (37)..(1470)
gtgcacagtgagcaaccctcttgttcttcatcaacaatgctccaaacaacctgcattatactcttctctgttgtggccatatttttgcctcatggaacagcaatgctcaacctcactctcccaggacaacacccagaccctgaagccgttgctcgagaagttcataggaaagtgaatgcttcaatggcaagaagggaaatgctgggagtgtcagagaaagaggtggcatcatgtctaacagggaatcccatagatgattgttggaaatgtgacccagattgggccaacaacaggcagaggctagcagattgtgcaatagggttcgggcagaacgcaaagggaggaaaaggtggccaattttacatagtcactgattcctcagatgaggaccctgtgaacccaaaacctggaacacttagatatgcagtgatacagaacgagccactgtggatagtgttccccagtaacatgatgattaagctgtctcaagaactcatttttaatagctacaagaccattgatgggcgtggagctgacgtgcacattgtgggtggaggctgcattactcttcagtatattagcaatgtcattattcacaacattcacatccaccattgccatccctctggcaacgctaacgtgcggtcgagcccggaacattatgggtaccgcacggagtcggacggcgacgggatctccatcttcggctcgcgtgacatttggatcgaccactgcaccctctcccggtgcaaggacggcctgatcgatgcagtgatgggttccagcgctatcacgatctccaacaaccacttctcccaccacaatgacgtgatgctcctgggccacagcgaccactacctcccagactccggcatgcaggtgaccattggcttcaaccacttcggggagggcctcgtccagcgcatgccgcgttgccgacgaggttacatccacgtggtgaacaatgacttcacacgatgggagatgtacgccatcggcggcagtgcgggacccaccattaacagccagggaaaccgctacaccgcgccggaggatccgtacgcgaagcaggttacgaagaggctggatgccggagaaggggagtggagcgggtggaattggcggtccgaaggggatgttttgttgaatggcgcgttcttcgttgcttcgggagcagttgctgaacctaactatcagaacgcctacagcacccaacctaagaacgtggatcgcatttcgcttctcactatgtccgccggtgttctcggcgttgctagggacaataatctgggaatgtggatcagaggacccaacgatggcactgtatatttttcagattctggcccagaatacacagacgaaatgtcccggagtacaatgccgttgctaccttcacgtattttgattcttgtatctgcactcttatgcttcttaggtcatacaacaaccttaacaacactacccaattagcgacttcaattcgatgatgcttcatgtctctattagaattaatgaaatcgccggattctaatgatccattaatcaaaaaaaaaaaaaaa

SEQ ID NO: 1818 - protein, 477 aa, Glycine max
MLQTTCIILFSVVAIFLPHGTAMLNLTLPGQHPDPEAVAREVHRKVNASMARREMLGVSEKEVASCLTGNPIDDCWKCDPDWANNRQRLADCAIGFGQNAKGGKGGQFYIVTDSSDEDPVNPKPGTLRYAVIQNEPLWIVFPSNMMIKLSQELIFNSYKTIDGRGADVHIVGGGCITLQYISNVIIHNIHIHHCHPSGNANVRSSPEHYGYRTESDGDGISIFGSRDIWIDHCTLSRCKDGLIDAVMGSSAITISNNHFSHHNDVMLLGHSDHYLPDSGMQVTIGFNHFGEGLVQRMPRCRRGYIHVVNNDFTRWEMYAIGGSAGPTINSQGNRYTAPEDPYAKQVTKRLDAGEGEWSGWNWRSEGDVLLNGAFFVASGAVAEPNYQNAYSTQPKNVDRISLLTMSAGVLGVARDNNLGMWIRGPNDGTVYFSDSGPEYTDEMSRSTMPLLPSRILILVSALLCFLGHTTTLTTLPN

SEQ ID NO: 1819 - DNA, 1806 bp, Brassica napus
  CDS (62)..(1357)
ctcactcctctgctctaattctctcgaaccataataaacactctgctcagcttctgcctcaatggtggttcttccgacatggattttagctatgatatgtctactcttcttcgtgggagcaatggacaacagtacacacgacaagatctcatctctatccagatcggacgaaatcgaatggaacaagcatgcagtgacgaatccggatgaagtagctgacgaagttatcgccttggctgaaatgagtgtaagaaatcataccgagaggaggaagctaggttactttacttgcggaacaggcaacccaatcgacgattgctggcgatgcgatcgcaactggcacaagaaccgcaaacgcctagcggactgtggtatcggatttggaagaaacgcgattggcggtcgcgacgggcgtttctacgtagtcactgacccaagagacgacaacccggttaaccctagaccgggaacattacgtcacgccgtgacccaagaccgaccactatggatcgtctttaaacgtgacatggtgattcagttaaaacaagagctaatcgtaaacagtttcaaaacgatcgacggacgtggcgcaaacgttcacatcgctaacggcggttgcatcacgattcagtacgtgacgaacgtcatcgtgcatggattgcatattcatgattgtaaaccgacgggtaacgctatggttagaagctcagagacgcactttgggtggagaacgatggctgatggtgacgccatttccatctttggttcgagtcatgtttggattgatcacaactcgttgtctcattgcgctgatgggcttgtggatgctatcatgggctccaccgcgattacgatctctaacaaccacatgactcaccacaacgaggttatgttgctcggacatagtgattcttacacgagggacaaagctatgcaagttaccattgcttataaccattttggagtcggacttattcaaagaatgccaaggtgtcggcatgggtacttccatgtcgtgaacaacgactatactcactgggaaatgtatgcgatcggtggaagtgcaaacccaacaatcaacagtcaaggaaaccgctacgccgcccctaaaaatccttttgccaaagaggtaacgaagagagtgaacacacctacgggtcattggaaaggatggaactggagaaccgaaggagatttgcttcagaacggagcttacttcactgcttcgggagtcgctgcatctggtagctacgcacgtgcctctagcctcgccgctaaatcttcttcattggtcgatacaattacttctgacgctggagctctaccatgtcgccgaggacgtcaatgtacctcatagttgtttttaacctcctaccgacaccataaccaccaaaattcataaccattttctattatatttagacaaaagtgtacattctcacacatttgtcaattaaaagcctattgtctcttctttttttcgtctgtgtttgtgtcaatttttcaacctcgggttttcttgcttcaaccgcaagttaacacaagaaaaggaaataaaaaaacttttcatgtaaaagagaaactcccgaagtgttgttggttctgtctgatcaactcgtatacccagaaaaaaacaagaatgttaatgtcttgttttttcttttgtgtgttcttctggtttataattaaatataatgtctaatgatttgtgaatctttctacttgtctttgtaatagagtgtctaataaagtgtaatatagtgtctaataaaagtttatagctttgatagcaaaaaaaaaaaaaaa

SEQ ID NO: 1820 - protein, 431 aa, Brassica napus
MVVLPTWILAMICLLFFVGAMDNSTHDKISSLSRSDEIEWNKHAVTNPDEVADEVIALAEMSVRNHTERRKLGYFTCGTGNPIDDCWRCDRNWHKNRKRLADCGIGFGRNAIGGRDGRFYVVTDPRDDNPVNPRPGTLRHAVTQDRPLWIVFKRDMVIQLKQELIVNSFKTIDGRGANVHIANGGCITIQYVTNVIVHGLHIHDCKPTGNAMVRSSETHFGWRTMADGDAISIFGSSHVWIDHNSLSHCADGLVDAIMGSTAITISNNHMTHHNEVMLLGHSDSYTRDKAMQVTIAYNHFGVGLIQRMPRCRHGYFHVVNNDYTHWEMYAIGGSANPTINSQGNRYAAPKNPFAKEVTKRVNTPTGHWKGWNWRTEGDLLQNGAYFTASGVAASGSYARASSLAAKSSSLVDTITSDAGALPCRRGRQCTS

SEQ ID NO: 1821 - DNA, 1498 bp, Brassica napus
  CDS (59)..(1297)
gacaaaagcctctggctcggacagagacaaagaaacatcacaaaacagagcaagaacaatggctaccacgcaagtacttgtcctctttgcttcagcattactcctaacaatgctctttgctggcgtcgattccaccaggtccaatgaaacatggcatgaacatgcagttgagaatccagacgaagtagctgccatggtggacattaccatgcggagaaggttaggttacttctcttgctccaccggtaaccccatcgacgattgctggcgttgtgaccggaaatggcaactccggcgaaaacacctagccgtctgcgcaatcggattcggacgcaacgcaataggcggcagagacggacgttactacgtagtaagcgaccctaacgacgataacccggttaaccctaaaccgggtacactccgtcacgccgtgatccaagtcgagcctctttggatcgtcttcaaacgcgacatggtcataacactgaagcaagaactcatcatgaacagcttcaagacgatagatggtcgtggcgtcaacgtccacatagctaacggtgcatgcatcacgatacagtacgtgacgaacattatcatacatgggattcatattcatgactgtaaacctactggtaaggctatggtgagaagctctccgtcgcattatgggtggaggacgatggctgacggtgatgggatctcgatctttgggtctagtcatatttggattgatcacaactcgctctctagttgcgctgatgggctcattgatgctgttatggcttccaccgctattactatctctaacaattactttacgcaccataacgaggttatgttgttgggacatagtgatacttacacaagggacaaggtgatgcaggttactattgcttataaccattttggtagaggtcttatccagaggatgccaaggtgtaggcatggatacttccatgtagtaaacaatgactacacacattgggaaatgtatgcaattggtggcagtgcaagtcccaccatcaatagtcaaggaaacagatatcttgcccctagaaaccgctttgctaaagaggtgacaaagagagactatgcaggacactggcaatggaagcattggaactggagatcagaaggagatcttttcctaaacggtgctttcttcacacgttctggttcaggacgtggagctagctacgctagagcttcaagtttggcagccaaatcgtcatcccttgttggcgtcattacctctaatgctggcgctcttaattgcagaggtggtcgccggtgttaatacttgctcattagtctttcttttgggttcttgcattttatacatggcaatagcactattggagtgttgaggcttgattaaaaactgcctcaactgtagtgtaaatgttggatgattacattcttgttttaccaccttcttgtgtttgatgtatctataaaggtaaacaaagttgggactcctcataaaaaaaaaaaaaaa

SEQ ID NO: 1822 - protein, 412 aa, Brassica napus
MATTQVLVLFASALLLTMLFAGVDSTRSNETWHEHAVENPDEVAAMVDITMRRRLGYFSCSTGNPIDDCWRCDRKWQLRRKHLAVCAIGFGRNAIGGRDGRYYVVSDPNDDNPVNPKPGTLRHAVIQVEPLWIVFKRDMVITLKQELIMNSFKTIDGRGVNVHIANGACITIQYVTNIIIHGIHIHDCKPTGKAMVRSSPSHYGWRTMADGDGISIFGSSHIWIDHNSLSSCADGLIDAVMASTAITISNNYFTHHNEVMLLGHSDTYTRDKVMQVTIAYNHFGRGLIQRMPRCRHGYFHVVNNDYTHWEMYAIGGSASPTINSQGNRYLAPRNRFAKEVTKRDYAGHWQWKHWNWRSEGDLFLNGAFFTRSGSGRGASYARASSLAAKSSSLVGVITSNAGALNCRGGRRC

SEQ ID NO: 1823 - DNA, 1583 bp, Brassica napus
  CDS (53)..(1429)
tggtttcaacaggaaaaacatatcccagcggcttttatcgccgcattctcaaatgacagcagcggttttgaatattggcggctacctttttgtcttctgcttgtcgttattagcaacattgactccacacgttggagccaatgttgctgtcttcgacaattactggttacaacgtcaaggcgatgcgttgaaacaaaccattgcctctttcgatcctaatcctcttaacgtcaccgaccatttgaattaccatgtcgctttagccgtggacgccacggaatcaaccaacagcacaaggagagagctctcacaggtgagaaatggtcggaaactaaagagaagcggaaaatgcgtagcgtacaaccctatagacagatgctggcgatgcaacggtgactgggagaagaaccgtaagaaactagcggattgtgtactcgggttcggcaggagaaccaccggaggcaaagacggacctatctacgtcgtcaacgacgcctccgatgacgatcttatcaaccctaagccaggaacgttaaggcacgcggtgacaagagacggaccgctttggatcatattcggaagcagcatgatcataaacttgcaacaagaactgatcataacgagcgataaaacaatagatggacgtggagctagggtttacatcatggaaggagctggattaacgctgcagtttgtgaacaatgtgatcatacacaatatttatgtcaagcacgttgttcctaagagcggtggtttgatcagagactctgagcagcatatagggcttaggacggtaagcgatggtgatggaatcagtttgtttggtgcaacgaatgtttggatcgatcatgtctcgatgactagatgttcagatggtatgattgatgcgattcttggctccactgctataactatttccaacagccatttcaccgaccatgaagaggtgatgctatttggggccaatgacaagcacgtgatcgacaagaaaatgcagataacggttgcgttcaaccactttggtaagagactggatcaaaggatgcctcgttgcagattcggaacgatccatgtggtgaacaatgactacacacattgggagatgtacacaattggtggaaacatgaaccctacaatcattagccaaggcaaccgtttcattgctcctcctaacgaacaagccaaacagattacaaagagagagtacacaccttacgttaactggaaaatgtggaactggcaatcagaaggagattacttcttgaatggagcttactttgtgcaatccggaaaacaaaatgcatggagccctaaaccgattaaccctgtcccgaaaaagtttgccatacgacctcaaccgggaactatggtccgtaaactcaccatggacgcaggagcacttggctgcaagccgggtacaccctgctgattaaaactaccattttgtccccttccagccaaaaaaaaagcttatgctttgtagttgcttgtcgtccaagaaaagagagaaagtaagcagaagggagtgtttcctatgagtggggttaattattctttttagaattcaggttcacgacacgcag

SEQ ID NO: 1824 - protein, 458 aa, Brassica napus
MTAAVLNIGGYLFVFCLSLLATLTPHVGANVAVFDNYWLQRQGDALKQTIASFDPNPLNVTDHLNYHVALAVDATESTNSTRRELSQVRNGRKLKRSGKCVAYNPIDRCWRCNGDWEKNRKKLADCVLGFGRRTTGGKDGPIYVVNDASDDDLINPKPGTLRHAVTRDGPLWIIFGSSMIINLQQELIITSDKTIDGRGARVYIMEGAGLTLQFVNNVIIHNIYVKHVVPKSGGLIRDSEQHIGLRTVSDGDGISLFGATNVWIDHVSMTRCSDGMIDAILGSTAITISNSHFTDHEEVMLFGANDKHVIDKKMQITVAFNHFGKRLDQRMPRCRFGTIHVVNNDYTHWEMYTIGGNMNPTIISQGNRFIAPPNEQAKQITKREYTPYVNWKMWNWQSEGDYFLNGAYFVQSGKQNAWSPKPINPVPKKFAIRPQPGTMVRKLTMDAGALGCKPGTPC

SEQ ID NO: 1825 - DNA, 1617 bp, Brassica napus
  CDS (51)..(1271)
cgtttccctcttctcttacttaaaccaagagaagaaaaaaataaagaaaaatgcagatgacgaagctctttatctccatagtctcctttcttctctatgctcatttgatcttatcttcaccagtaccagacccagaagctatcgtcgaagaagttcacaagagcattaatgcgtcggttgctggaagaaggaagctaggttacctctcatgcaccactggtaaccccatcgacgactgttggcgatgcgatccacactgggagaccaaccgtcaacgtctcgcagactgcgccatagggttcggcaagaacgctataggtggccgagatggtcgtatctacgtggtgacagactcaggaaacgacgacccagtgacccccaaacccggaacgttaagatacgctgtggttcaagacgagccactatggatcattttccaacgagacatgaccattcagctcaaagaagagctgatcatgaactctttcaagaccatagacggtcgtggcgcgtcagtacacatagctggtgggccatgcattacgatccagtacgtgactaacatcatcatccatggtatccatatccatgattgtaagccaggtggtaacgctatggtgcggagctcaccacggcattacggatggagaacgatatcggacggtgacggtgtctccatctttggaggaagtcatgtttgggttgaccattgttcgttatctaattgcgaagacgggcttattgatgctataataggctcgacggctattactctgtctaacaattacatgacgcatcatgataaggtcatgttgcttggtcatagtgacacttacactcgtgacaagaacatgcaaatcaccattgcttttaaccattttggcgaaggtcttgttcaaagaatgccaaggtgtagacatgggtacttccatgtggtgaacaacgactatacacattgggagatgtatgctattggtggaagtgctaaccctacaatcaatagtcaagggaacagatttttggccccagatattagatttagcaaagaagtgactaagcatgaggacgccccagagagtgagtggaagagctggaactggagatcctctggtgatttattgctaaacggtgcattttttacgccttcgggtggtgctacctcgtctagctatgccaaggcttcgagtcttggggctagaccgtcttctcttgttggaccgttgacggttggttctggtgcattgaattgccgtaagggttcccgttgctgattgtggtggctcacttaagtgtatttagccaatttaaaaaatgatatagaaaaggcaattaaagccatcaattaaggggttaagttataactttcattacccccttttaattagtctcttttgatttttcttctttttggggtaaagttaaggagaatacaacctctggcttcacttctcttaggacccatctaaggaattttctgttttaaggtatcttttatggccccatcttttattaggttaaagtgtagtaacaagtgcagatgtgttgatcttcatattaatatactataatatatgtcttctgttttttttaaaaaaaaaaaacaaaaaaaaaaaaaaa

SEQ ID NO: 1826 - protein, 406 aa, Brassica napus
MQMTKLFISIVSFLLYAHLILSSPVPDPEAIVEEVHKSINASVAGRRKLGYLSCTTGNPIDDCWRCDPHWETNRQRLADCAIGFGKNAIGGRDGRIYVVTDSGNDDPVTPKPGTLRYAVVQDEPLWIIFQRDMTIQLKEELIMNSFKTIDGRGASVHIAGGPCITIQYVTNIIIHGIHIHDCKPGGNAMVRSSPRHYGWRTISDGDGVSIFGGSHVWVDHCSLSNCEDGLIDAIIGSTAITLSNNYMTHHDKVMLLGHSDTYTRDKNMQITIAFNHFGEGLVQRMPRCRHGYFHVVNNDYTHWEMYAIGGSANPTINSQGNRFLAPDIRFSKEVTKHEDAPESEWKSWNWRSSGDLLLNGAFFTPSGGATSSSYAKASSLGARPSSLVGPLTVGSGALNCRKGSRC

SEQ ID NO: 1827 - DNA, 1876 bp, Glycine max
  CDS (88)..(1434)
ctctctcttctctttctctcttcaacattctctctcaccaaagcaacaacacacacactgagagcgaggggaattcaactttctgcaatggcggtttcttcttcttctgcaacaaaatgggtcgtcttcttgcttctggcgctgcttattcgagaagaagctatggctacaccacagatctctgacctcaggaatcttgaagttgaaagacacaggttgccgagcttgacgaactcgtcaatggcggagagggcaaaagaggctgagaaattaaatgaacaagctgcagtggctaacccagaggaagtggtttcaatggttgagatgagcatccaaaacagtacagagaggaggaagttgggatttttctcttgtggaactggcaaccccattgatgattgctggcgttgcgaccccaactggcaacgcaatcggaagcgtcttgcagattgtggcattggttttggccgaaacgccatcggtggccgtgatggaaaattctatgtggtgactgaccccagggatgatgaccctgtgaacccgaaacccggcactcttcgccatgctgtgatccaggataagccattgtggattgtgttcaagagggacatggttattcagctgaaacaagagctgatcatgaacagcttcaagacaattgatggtagaggagtcaatgtgcacattgctaatggagcatgcatcacaattcagtttgttaccaatgtcatcatccatggcttgcacattcatgattgcaaacctactggaaatgctatggtgagaagctccccaacccactttggttggaggacaatggctgatagagatgccatctccatatttggctcaagccacatttgggttgaccacaactccttgtcacactgtgctgatggccttgtggatgctgtcctgggctcaacagccataactatttccaacaaccacttcacccaccacaatgaggtgattctgctgggccatagtgactcttacacaagagacaagcagatgcaagtgaccattgcatacaaccattttggagagggacttatccagagaatgccacgttgtagacatggatatttccacgtggtgaacaatgactacactcactgggagatgtatgctattggtggaagtgctaaccccaccatcaacagccagggcaacagatacaatgctcctactaaccgttttgccaaggaggtgacaaagagagtggaaacagcagaaagtcagtggaagggttggaattggaggtcagagggagatttgttgctgaatggtgcctatttcacaccatctggtgctggagcctcagcaagctatgcaagagcctctagcttaggagcaaaatcttcttccatggttggttccatgacttccaatgctggtgcactaggttgcaaaagaggcagtcagtgctagcatatattatcatcaaccacaaccatgtgaatgaaagaggtcatccattatttttcttttgttgtttgattctcaaggttttaccatattatagtagaacatcatcatcatcatatatccataatccattgctttctttcctcacacctccatcatcatatcctgcagtattcttgacaagtgtacattaaattacacatgtcaatatggttttatgtgttacccctttgccacaccgtgtgtattgttgttggtcaaccttagctgctcgacttgctccagctgaaacaagcaatgcaattgtaggagcaggtgcagaagcgccatccattgttttcttccctttttcattcttactcttttttttttttgcctttttcttcctttggtccttcccatctcatcccccccccccacaccaattcatatgcatatttttcgc

SEQ ID NO: 1828 - protein, 448 aa, Glycine max
MAVSSSSATKWVVFLLLALLIREEAMATPQISDLRNLEVERHRLPSLTNSSMAERAKEAEKLNEQAAVANPEEVVSMVEMSIQNSTERRKLGFFSCGTGNPIDDCWRCDPNWQRNRKRLADCGIGFGRNAIGGRDGKFYVVTDPRDDDPVNPKPGTLRHAVIQDKPLWIVFKRDMVIQLKQELIMNSFKTIDGRGVNVHIANGACITIQFVTNVIIHGLHIHDCKPTGNAMVRSSPTHFGWRTMADRDAISIFGSSHIWVDHNSLSHCADGLVDAVLGSTAITISNNHFTHHNEVILLGHSDSYTRDKQMQVTIAYNHFGEGLIQRMPRCRHGYFHVVNNDYTHWEMYAIGGSANPTINSQGNRYNAPTNRFAKEVTKRVETAESQWKGWNWRSEGDLLLNGAYFTPSGAGASASYARASSLGAKSSSMVGSMTSNAGALGCKRGSQC

SEQ ID NO: 1829 - DNA, 2076 bp, Glycine max
  CDS (343)..(1857)
aaaaaaagcggccgctgcgtgtcggtctctctctttttccatcctggaataattatccgaccattactattataaatctagttattataaaaaccccacccacaaagcaacttactaatttttccatcctagaataattacccgaccattactattataaatctagttattataaaaacccctcctatttcccccaaattttcgagcttcataagtaattgtgcattcaagaggaaaacatcatcccaagccaagcatcattttacaacacaaaaaaacagacaaaacaaaccccttcccaaacccaaactcaatcataattgtttgttccttgaaagaacaatgctccccatcacctgcattctttttatgtgccttttaagttccttctcacccccaatcaacgctcttctcaacctcaacctcaccctgccccatcaataccctcaccccgaatccgtcgtccaagatatccaacggaaggtgaatgcctcactacggagaagggaaatgctgtcaaaggacgaacaacaaggcatgtcttcgtgtctgacaggaaaccccatcgacgactgctggcggtgcgagccgaactgggcggcggagcggcagaagctggcggagtgcggcctcgggttcggcaaatacgccatgggcggcaaaggcgggcagatctacatcgtgacggactcctcggaccgcgaccctgccaaccccattccgggcaccctccgccacgccgtcatccaagacgaggcactctggatagtcttcgccgccgacatgaccatcaacctaaaacacgagctcatattcaacagctacaagaccctggacggccgcggagccaacgtccacgtcaccggccacggctgcatcacgctccagtacgtctccaacatcatcatccacaacatccacatccaccactgcactccctccgggaacaccaacatacgagccagtccaacgcacgtagggtggagaggcaaatcggacggtgatgggatttcgatttttggctcgcggaagatctggatcgaccattgctcgctgtcttattgcacggacggcttgatcgatgctattatggggtccactgggattactatttcgaatagtcattttgcgcaccatgatgaggtgatgcttcttggacacgatgataagtacttggtggataggggcatgcaggttacaatcacgtttaatcacttcggcgagggtttggtgcagcgcatgccacgatgcaggctcggttatatccacgtcgttaataatgacttcacgcagtggaggatgtatgctatcggcggtagcgctaaccccaccatcaacagccagggcaaccgttacacggctcccggagaccctgatgccaaggaggtgacgaagcgcgtggacacagacgatagagagtggagtggttggaattggaggacggaaggggacataatggtaaatggagcgttctttgtaccatcgggtgctgcggggcagagtggccagtaccaagaggccaccagtgtgcaagccaaatccgccgtgcaaatagaccagctcactatgtactccggtgtcttgggtgatcccagggataatggggatttatatcccggcttcaacggcggtgggaccgtgaccggagccaccagcaaaggcaacactgacgggtccagcagtgacgatgggggggacttcttcgggatgatattcagaggtggcagcagcagcagcagcagcagccaagcagcgccaccatcgtccgttctatttgtttcaatctttttgtctcttttaattatttttgttttggacactaccaccaaccatgcctttttattatcattactatgatcacacaattgggaaaggggaaaaacaaaaaaactcccttgatgcccaaaaaaattatcaaaagcaaaagaatgatcaaaagttcctaaaattcgtttttaaatttagaaactaggaatcgtgtttaggtatgtacacagctcttcaaagttattattaaaatctaaatagagctaggtgcactatgattggtcattgtctcccaaaaaaaaaaaaaaa

SEQ ID NO: 1830 - protein, 504 aa, Glycine max
MLPITCILFMCLLSSFSPPINALLNLNLTLPHQYPHPESVVQDIQRKVNASLRRREMLSKDEQQGMSSCLTGNPIDDCWRCEPNWAAERQKLAECGLGFGKYAMGGKGGQIYIVTDSSDRDPANPIPGTLRHAVIQDEALWIVFAADMTINLKHELIFNSYKTLDGRGANVHVTGHGCITLQYVSNIIIHNIHIHHCTPSGNTNIRASPTHVGWRGKSDGDGISIFGSRKIWIDHCSLSYCTDGLIDAIMGSTGITISNSHFAHHDEVMLLGHDDKYLVDRGMQVTITFNHFGEGLVQRMPRCRLGYIHVVNNDFTQWRMYAIGGSANPTINSQGNRYTAPGDPDAKEVTKRVDTDDREWSGWNWRTEGDIMVNGAFFVPSGAAGQSGQYQEATSVQAKSAVQIDQLTMYSGVLGDPRDNGDLYPGFNGGGTVTGATSKGNTDGSSSDDGGDFFGMIFRGGSSSSSSSQAAPPSSVLFVSIFLSLLIIFVLDTTTNHAFLLSLL

SEQ ID NO: 1831 - DNA, 1363 bp, Helianthus annuus
  CDS (35)..(1243)
ctttgtatatctcaagagggaagagaagaaaaacatgaagttgccaatctttcttcttctcattcttgctcttcttgcccctatctccactacatcttcacatgtacaagatcctgatcttgtagtagaacatgtccacaggagtataaatgaatctaggaggaatttgggatctctatcatgtgggaccggaaatccaatcgacgattgctggcggtgtgacaagagttgggaaaagaatcgccaacggctagccgattgtgcaatcgggtttggaaaacacgccattggtggacgtgatggtaaaatatacgttgtcaccgactctaaaaatgatgatccggttaaccctaaaccgggaactttaagatacggggtgatccaaaacgaaccgttatggatcatatttgcacatgacatgaccattcgactcaaagaagaactcttgatgaactcattcaagaccatcgatggtcgtggggccaatgttcatatagccggtggaccatgcatcaccatacaatatgtgacaaacatcatcatacatggtgtcaacatacatgattgtaagcaaggggggaacaccgatgttagggactcaccggaccattatgggttccgcacaatatcggatggtgatgggatctccatctttggtggaagtcatgtatgggtggatcattgttcattggctaattgtcatgatggtttaattgatgccatacatggatccacagccataaccatatccaataactacatgacacatcatgataaggtcatgttattgggacatagtgacactttacttcaagacaagaatatgcaagtcacaattgcatttaaccattttggtgaaggccttgtacaaaggatgccaagatgtaggcatgggtatttccatgtggttaacaatgactatacccattgggaaatgtatgcaattggaggaagtgcttcaccaaccatcaatagtcaagggaatagatttctagctcccaatacatatgataataaagaagtgacaaaacgagaggaggcgtcagaaagcgaatggaaaaactggaattggcgttcagaaggcgacctcatgttaaacggtgcctatttcactccatcaggcgcaggggcgtctaaaagttatgcacgagcatcaagcttaagtgcaagaccatcttccattgtggggtttgtcacagctaacgcaggtgtacttcgctgcacgaggggctctcggtgctagtcttaagccccacgggtcctttcgatttgtttctaagttaacaaaaaagcaatattgtgttgataatattatataaaattacttacataagcaaacaaattttccaaaaaaaaaaaaaaa

SEQ ID NO: 1832 - protein, 402 aa, Helianthus annuus
MKLPIFLLLILALLAPISTTSSHVQDPDLVVEHVHRSINESRRNLGSLSCGTGNPIDDCWRCDKSWEKNRQRLADCAIGFGKHAIGGRDGKIYVVTDSKNDDPVNPKPGTLRYGVIQNEPLWIIFAHDMTIRLKEELLMNSFKTIDGRGANVHIAGGPCITIQYVTNIIIHGVNIHDCKQGGNTDVRDSPDHYGFRTISDGDGISIFGGSHVWVDHCSLANCHDGLIDAIHGSTAITISNNYMTHHDKVMLLGHSDTLLQDKNMQVTIAFNHFGEGLVQRMPRCRHGYFHVVNNDYTHWEMYAIGGSASPTINSQGNRFLAPNTYDNKEVTKREEASESEWKNWNWRSEGDLMLNGAYFTPSGAGASKSYARASSLSARPSSIVGFVTANAGVLRCTRGSRC

SEQ ID NO: 1833 - DNA, 1464 bp, Arabidopsis thaliana; identical to SEQ ID NO: 1650
  CDS (1)..(1464)

SEQ ID NO: 1834 - protein, 487 aa, Arabidopsis thaliana; identical to SEQ ID NO: 1651

SEQ ID NO: 1835 - DNA, 1647 bp, Glycine max
  CDS (165)..(1508)
cactagcactgcagcacaagcagcaccgactcattattgttcaaactttaaacttcaaaatcaaagtttttgattctgtcattttgctcacccttgatttggtttccttatagaggaaaatcaaaattcaaaatcaaaatcaaccacaaccctccaacaccaccatgcagagctggaagtggaacaggaagaaaccacctgttttccctttgcttgtgcttattttactgttcttcatagccttctcaaccctccacagtgaacacattatacaacgaatccatgaaaatccagatcatgttcacaaccaccaagaagtttcttcagccacctttgtcaaacccaacctctctggtcacctaaagcaagctgcagaggttttggatagattcagtagatgcaactccactgtagagtacaatggccgcaaagttgcttggctcggcgattctcagcattccggtcactggagtgcgaggccggaaagttgtgatgttttttcaggcaaatgggtttttgataatgtttcacatccactttacaacgagtcagattgcccttacatgtctgaccaattggcctgtcacaagcatggaaggtctgatttggggtaccagtactggagatggcaaccacataactgcaatttgaaaaggtggaatgtgaaagaaatgtgggagaagttgagaggcaaaaggctaatgtttgttggagattcactaaatagagggcaatggatatctatggtatgtttgttacaatcagtaattcctgctgataagagatcaatgtcaccaaatgctcatctcaccattttcagagcagaggaatacaatgcaactgtggaatttctctgggctcctcttcttgttgaatctaattctgatgacccagtaaatcacagactagatgaacggataattcgtcctgatacggttcttagacatgcatcactgtgggaaaatgctgatatacttgtttttaacacatacttatggtggagacaaggcccagtcaagctattatggacagctgaagaaaatggagcttgtgaagaattggatgggcatggagccatggagttagccatgggagcctgggcagattgggtatcttcaaaagttgacccactcatgaagcgtgtcttttttgtgacaatgtcgccaactcatctctggagccgagagtggaaaccaggaagcaagggtaactgttatggggagaaggatcccattgaccttgagggctactggggaagtggttcagatttgcctacaatgagcaccgtggagaagatcctaagacatttgaactcaaaagtttctgtcatcaacattactcaactatcagagtatagaaaggatggtcatccttccatttttcgcaaattttgggagccccttcggccggaacaattgtcaaatcccccgtcttactctgattgcattcattggtgcttgcctggggtacctgatgtgtggaatgagttactcttccattttttgtagaaattgtttaactattcaatttccttgattgaatatagcagccaatgtcttcattttaaagagtggcaaaagctgcttacattagttgtttgcacgcaagggtggactgtttttgacaagtgaatgctgaaaaaaaaaa

SEQ ID NO: 1836 - protein, 447 aa, Glycine max
MQSWKWNRKKPPVFPLLVLILLFFIAFSTLHSEHIIQRIHENPDHVHNHQEVSSATFVKPNLSGHLKQAAEVLDRFSRCNSTVEYNGRKVAWLGDSQHSGHWSARPESCDVFSGKWVFDNVSHPLYNESDCPYMSDQLACHKHGRSDLGYQYWRWQPHNCNLKRWNVKEMWEKLRGKRLMFVGDSLNRGQWISMVCLLQSVIPADKRSMSPNAHLTIFRAEEYNATVEFLWAPLLVESNSDDPVNHRLDERIIRPDTVLRHASLWENADILVFNTYLWWRQGPVKLLWTAEENGACEELDGHGAMELAMGAWADWVSSKVDPLMKRVFFVTMSPTHLWSREWKPGSKGNCYGEKDPIDLEGYWGSGSDLPTMSTVEKILRHLNSKVSVINITQLSEYRKDGHPSIFRKFWEPLRPEQLSNPPSYSDCIHWCLPGVPDVWNELLFHFL

SEQ ID NO: 1837 - DNA, 1700 bp, Triticum aestivum
  CDS (20)..(1474)
gtcagggacagggtgatcgatgatgatgaaggttagcccaagggtcagcgttcacgtttgcttgtgcaacactagacatgggaaggagtgcccccattacaataaaagaggggacagcgccacagccgattcaccagagaaaatgaagccggagcaggccacccacaacaagatgaccacggcgacgtcctccccgtcccctgtcgtcggcctgcggggcgtggtgagctccctcgtcgccttcttcatcgtcgtcagcaccgtctccctgctgttcgaccgcggccacgagtcgcaggtgcagctgacggtccagcaccggcaccaggaggtgaaggtggcggcggccgggggccacgaggcgcaggtgcagtggacggacgagctcatgggcgaggccatgaggggctccggcgaggagtgcaactggtccttgggacggtgggtgtacgacaacacctcccagccgctctactccggcctcaactgctccttcatcttcgacgaggtcgcctgcgagaagtatggccggaatgacaccaggtaccagtattggagatggcagcccgatggatgtgatcttccaaggttcaacgccacgaaactgctcgaaaagctgaggaacaagaggatggtcttcgtcggcgactcaatcaacaggaaccaatgggtctccatggtgtgcatggtggaggcctccatccctgaaggccagaagatgcgcgtttacaacggctcactcatctccttcacggcattcgaatacaatgcgacaatcgacttctactggtcgccgctgatactagaatccaacagcgacaacccgataattcaccgggttgagtaccggatcatacgggcggagaagattgagaagcatgcccgtgcctggggcaatgctgacgttattgttttcaactcttacctttggtggaggaagcagaagcccgatatgaagatgaaggtcatgtatggctcatttgaggatggtgatgcaaagctagacgaagtggagatggtggaaggtttcgagattgctctcaagaaactaaccgaatgggtgggagcgaacgtcaacaacaagaccaaaatctatttcgcaggctcgtcgcctacccatacctgggcaagcgactggggcggagacgacagcaacaagtgcctgaacgagtcggagccgatccagaaggtcgggtacaaaggcgcgaccacggactacagcatgatggacaaggcgaagcagatcttcagaccactggagcagaaaggcataaacgttcagatactcaacttcacccagctgaccgactaccgcatcgacgcgcaccccaccgtgttccggcggcagttcacccccctcacgaaggagcagatcgccaacccgagcagctacgccgactgcacgcactggtgcctccccggcgtccctgacgtgtggaaccacttcctctactcgtatctcgtgcagaaatgatgtaaatatacatatacatgccatttcttgttcgttcggggttttgttgttgcagttgtgggagggtctagattaggccgctgctgcctttatgtataggacatgccccgcgtcaaaaaaaaaagaaggtttctctgcacttgcttgtaaagagccaaggaagtgtatctgaaacagtactcctatgtggaaagggattaaggagatgttcaaaaaaaaaaaaaaa

SEQ ID NO: 1838 - protein, 484 aa, Triticum aestivum
MMMKVSPRVSVHVCLCNTRHGKECPHYNKRGDSATADSPEKMKPEQATHNKMTTATSSPSPVVGLRGVVSSLVAFFIVVSTVSLLFDRGHESQVQLTVQHRHQEVKVAAAGGHEAQVQWTDELMGEAMRGSGEECNWSLGRWVYDNTSQPLYSGLNCSFIFDEVACEKYGRNDTRYQYWRWQPDGCDLPRFNATKLLEKLRNKRMVFVGDSINRNQWVSMVCMVEASIPEGQKMRVYNGSLISFTAFEYNATIDFYWSPLILESNSDNPIIHRVEYRIIRAEKIEKHARAWGNADVIVFNSYLWWRKQKPDMKMKVMYGSFEDGDAKLDEVEMVEGFEIALKKLTEWVGANVNNKTKIYFAGSSPTHTWASDWGGDDSNKCLNESEPIQKVGYKGATTDYSMMDKAKQIFRPLEQKGINVQILNFTQLTDYRIDAHPTVFRRQFTPLTKEQIANPSSYADCTHWCLPGVPDVWNHFLYSYLVQK

SEQ ID NO: 1839 - DNA, 1530 bp, Arabidopsis thaliana; identical to SEQ ID NO: 923
  CDS (1)..(1530)

SEQ ID NO: 1840 - protein, 509 aa, Arabidopsis thaliana; identical to SEQ ID NO: 924

SEQ ID NO: 1841 - DNA, 1751 bp, Brassica napus
  CDS (33)..(1559)
agggtttttgagaagaagaagaagaagaaaccatggcttcctctgtaatctcttcctctcccttcgtctgcaaatcccccgctaagaaggatttgggggtttcttcgttccgtaaagcatcgcagatttcgattcatggatgccagaggaaatcgatttctcggaagatcgtctccgtcatggctccgcagcgctcatcgtccacctcaggatcggtgaaaactgggatgacgatgacggagaagattctggcgaaggcagcagagaagtcacaagtggtccctggtgataacatttgggttaacgttgatgttcttatgactcatgatgtctgtggccctggcgcttttggtatcttcaaaagagagttcggtgataacgctaaggtttgggactcggagaagatcgttgttataccagaccattacatattcacatctgataagcgtgctaaccgcaacgtcgacattatgagggagcattgcagggaacagaacatcaagtatttctatgatatcaccgacctcggagattttagggctaatcctgactacaaaggtgtttgccatgttgcgcttgcacaagaaggtcattgcaggcctggagaggttttgttaggaacagactcacacacatgtactgctggagcatttggtcagtttgctacagggattggaaacactgatgcaggctttgtgttaggcactggaaaaatcctccttaaggttccaccaactatgaggtttatcttggatggtgaaatgcccagttatttgcaagcaaaggatctgattctgcagatcattggtgaaatatctgttgctggtgcaacttacaagacgatggagttcagtggtacaactattgaaagtctgactatggaagaacgaatgacattgtgcaacatggtggtggaagctgggggaaagaatggtgtcatccctcctgatgcgacgacatttaattacgttgagaataggacatctgtaccctttcagcctgtatatagtgatgcaaatgcaagctttgtggcagattatagatttgatgtgtcgaagctagagcctgtagtggctaagcctcattctcctgataatcgtgctctagcgagagaatgcaaagatgtgaaaattgacagagtatacatcggttcttgtactggtgggaagactgaggattttatggctgcagctaaacttttccatgcagcaggaaaacaagtcaaagttccaacttttcttgtcccggccactcagaaggtgtggatggacgtgtatgcactcccagtacctggagcaggtggaaagacgtgtgcgcagatattcgaagaagctggatgtgacacaccaaccagtcctagctgtggtgcctgccttggtggcccagcagacacctacgctcgtttgaatgaacctcaagtgtgtgtctcgacaacgaacaggaacttccccggtcggatgggacacaaggaagggcagatatacttggcttctccttacactgctgcagcctcggctctaaccggccatgtcaccgacccaagagagttcttgcagtaggttaatgatagctgtacgggggaaaaagtctaatgctgcttcaagagagaatcttaatcgtcaagtgatgtgcattgtgaactattgtgtgtattttccttccttcgctgttgaactttgatagtttcaacaagcaatattttatgtttcgagtttgaaagaacaaaggattaatcgaaaaaaaaaaaaaaa

SEQ ID NO: 1842 - protein, 508 aa, Brassica napus
MASSVISSSPFVCKSPAKKDLGVSSFRKASQISIHGCQRKSISRKIVSVMAPQRSSSTSGSVKTGMTMTEKILAKAAEKSQVVPGDNIWVNVDVLMTHDVCGPGAFGIFKREFGDNAKVWDSEKIVVIPDHYIFTSDKRANRNVDIMREHCREQNIKYFYDITDLGDFRANPDYKGVCHVALAQEGHCRPGEVLLGTDSHTCTAGAFGQFATGIGNTDAGFVLGTGKILLKVPPTMRFILDGEMPSYLQAKDLILQIIGEISVAGATYKTMEFSGTTIESLTMEERMTLCNMVVEAGGKNGVIPPDATTFNYVENRTSVPFQPVYSDANASFVADYRFDVSKLEPVVAKPHSPDNRALARECKDVKIDRVYIGSCTGGKTEDFMAAAKLFHAAGKQVKVPTFLVPATQKVWMDVYALPVPGAGGKTCAQIFEEAGCDTPTSPSCGACLGGPADTYARLNEPQVCVSTTNRNFPGRMGHKEGQIYLASPYTAAASALTGHVTDPREFLQ

SEQ ID NO: 1843 - DNA, 1768 bp, Brassica napus
  CDS (17)..(1540)
agaagaaggagaaaccatggcttcctctgtaatctcttcctctcctttcgtctgcaaatcccccgctaaggatttggggttttcttcgttccgtaaaccatcgcagatttcgattcatggatgccagaagaaatcgatttctcggaagatcgtctccgtcatggctccgcagcgctcatcgtccacctcaggatcggtgaaaactgggatgacgatgacggagaagattctggcgaaggcagcagagaagtcacaagtggtccctggtgataacatttgggttaacgttgatgttcttatgactcacgatgtctgtggccctggcgcttttggtatcttcaaaagagagttcggtgaaaacgctaaggtttgggactccgagaagatcgttgttataccagaccattacatattcacaactgataagcgtgctaaccgcaacgtcgacattatgagggagcattgcagggaacagaacatcaagtatttctatgatatcacggacctcggagattttagggctaatcctgactacaaaggtgtttgccatgttgcgcttgcacaagaaggtcattgcaggccaggagaggttttgttaggaacagactcacacacatgtactgctggagcattcggtcagtttgctacagggattggaaacactgatgcaggctttgtgttaggcactggaaaaatcctccttaaggttccaccaactatgaggtttatcttggatggtgaaatgcccagttatttgcaagcaaaggatctgattctgcagatcattggtgaaatatctgttgctggtgcaacttacaagacgatggagttcagtggtacaactattgaaagtctgactatggaagaacgaatgacattgtgcaacatggttgtggaagctgggggaaagaatggtgtcatccctcctgatgcgacgacattcaattacgttgagaataggacatctgtaccctttcagcctgtatatagtgatggaaatgcaagctttgtggcagattatagatttgatgtgtcaaagctagagcctgtggttgctaagcctcattctcctgataatcgtgctctagcgagagaatgcaaagatgtgaaaattgacagagtatacatcggttcttgtactggtgggaagaccgaggattttatggctgcagctaaacttttccatgcagcaggaaagcaagtcaaagttccaactttccttgtcccggccactcagaaggtgtggatggacgtgtatgcactcccagtacctggagcgggtggaaagacatgtgcgcagatttttgaagaagctggatgtgacacaccaaccagtcctagctgtggtgcctgccttggtggcccagcagacacctacgctcgtttgaatgaacctcaagtgtgtgtctcgacaacgaacaggaacttccccggtcggatgggacacaaagaagggcagatatacttggcttctccttacactgctgcagcctcggctctaaccggccatgtcaccgacccaagagagttcttgcagtaggttaataatagctgtatggggaaaagtataatgctgcttcaagagagaacctcgatcgtcaagtgatgtgcattgtgaactatagtgtgtattttccttgcttcgctgttgaactttgatagtttgaacaagcagtattttctgttttgagtttgaaagaacaaaggataatcatataagtaaacgcttgaataaagatacatataacaatcgaaaaaaaaaaaaaaa

SEQ ID NO: 1844 - protein, 507 aa, Brassica napus
MASSVISSSPFVCKSPAKDLGFSSFRKPSQISIHGCQKKSISRKIVSVMAPQRSSSTSGSVKTGMTMTEKILAKAAEKSQVVPGDNIWVNVDVLMTHDVCGPGAFGIFKREFGENAKVWDSEKIVVIPDHYIFTTDKRANRNVDIMREHCREQNIKYFYDITDLGDFRANPDYKGVCHVALAQEGHCRPGEVLLGTDSHTCTAGAFGQFATGIGNTDAGFVLGTGKILLKVPPTMRFILDGEMPSYLQAKDLILQIIGEISVAGATYKTMEFSGTTIESLTMEERMTLCNMVVEAGGKNGVIPPDATTFNYVENRTSVPFQPVYSDGNASFVADYRFDVSKLEPVVAKPHSPDNRALARECKDVKIDRVYIGSCTGGKTEDFMAAAKLFHAAGKQVKVPTFLVPATQKVWMDVYALPVPGAGGKTCAQIFEEAGCDTPTSPSCGACLGGPADTYARLNEPQVCVSTTNRNFPGRMGHKEGQIYLASPYTAAASALTGHVTDPREFLQ

SEQ ID NO: 1845 - DNA, 1805 bp, Linum usitatissimum
  CDS (27)..(1559)
ccggcaagttccaatctttccttgtcatggcttcttctaccattgcctctccttccacatccttccttcccggcaaggaactgggtcgctcagttttcgcccaaccaccctcctctatctcggttcccaaatgcaggaattcgatctccaagaaaattgtttccgtcatggctccacatcaatcagagcgcaagccttcaactactggcacggtgaagactgctatgacaatgacagaaaaaatcttggctatggctgcagagaagtcccagttgagccccggtgaaaatgtttgggtcaatgttgatgtcttgatgacccatgatgtttgcggccctggttcttttgatatcttcaagaaagagtttgggcagaatgctaaggtttgggatcgtgagaagattgtggtgatacctgaacattacatattcaccaacgacaaacgtgcgaataggaatgtggatatcttgagagaattctgcacggagcaaaacattaagtacttctatgacattcaggaccgtgctaattttaaggctaaccctgattacaagggtgtctgccatattgcccttgcacaagagggtcactgccgacctggcgaggtcttgttgggtacagactcacacacctgtactgctggggcatttgggcaatttgccactggaattggcaacactgacgctggatttgtcttaggcactgggaaggccttgcttaaggtccccccaacattaaggttcgtaatggatggtgaaatgcctgactgtatacttgctaaggatttgattttgcaaatcattggtgaaatatctgtggcgggtgcaacatataaatcaatggagtttgtcggtacaactgttgagggtttaagtatggaagagcgtatgactttgtgtaacatggttatcgaagctggaggaaagaatggtgttgtgcctgctgacaacactacttttaattatcttgaggacaaggtatctgttccctatgagccagtttacagtgaccaacaagcaagatatttatcagagtatagatttgatgtttcaaaattggagccactagttgctaagccccattctcctgataaccgagctttagcaagagagtgcaaagatgtcaagattgacagagtatatattggatcttgtactggaggaaaaactgaggattttatggctgcggcaaaagtttttttagcttctggatataagaaggtcaaagcacccactttccttgtccctgctactcaaaaggtatggatggacgtttacagtctcccagtaccggggtctggtggtaagacatgctcccagattttcgaggaagtcggttgtgacacacctgcaagtcccagctgcggggcttgtttgggcggccctaaagatacttatggacgtttgaacgagcctaaggtctgtgtctcgacaacaaacaggaatttccccggacgaatgggacacaaagaaggagagatatatcttgcctcaccttatacagcagcagcttctgctttgactggctatgttaccgatccaagagagttcttgcattaggatgtctatatgagatcttgtttggagctcttactcaagtaaatcggtgtactagtaacttgaacttcttcaaaggttatttccagcatatgttgtatcaaataagttgcagaaaatttcactcagttgagtatgaatattgaagtttggttgccagatacaagtggttatgagtgaacaagaagattgatatacacttgagtagctagaagcatgctgttggttggttccaaaaaaaaaaaaaaa

SEQ ID NO: 1846 - protein, 510 aa, Linum usitatissimum
MASSTIASPSTSFLPGKELGRSVFAQPPSSISVPKCRNSISKKIVSVMAPHQSERKPSTTGTVKTAMTMTEKILAMAAEKSQLSPGENVWVNVDVLMTHDVCGPGSFDIFKKEFGQNAKVWDREKIVVIPEHYIFTNDKRANRNVDILREFCTEQNIKYFYDIQDRANFKANPDYKGVCHIALAQEGHCRPGEVLLGTDSHTCTAGAFGQFATGIGNTDAGFVLGTGKALLKVPPTLRFVMDGEMPDCILAKDLILQIIGEISVAGATYKSMEFVGTTVEGLSMEERMTLCNMVIEAGGKNGVVPADNTTFNYLEDKVSVPYEPVYSDQQARYLSEYRFDVSKLEPLVAKPHSPDNRALARECKDVKIDRVYIGSCTGGKTEDFMAAAKVFLASGYKKVKAPTFLVPATQKVWMDVYSLPVPGSGGKTCSQIFEEVGCDTPASPSCGACLGGPKDTYGRLNEPKVCVSTTNRNFPGRMGHKEGEIYLASPYTAAASALTGYVTDPREFLH

SEQ ID NO: 1847 - DNA, 1929 bp, Arabidopsis thaliana; identical to SEQ ID NO: 1025
  CDS (1)..(1929)

SEQ ID NO: 1848 - protein, 642 aa, Arabidopsis thaliana; identical to SEQ ID NO: 1026

SEQ ID NO: 1849 - DNA, 2419 bp, Zea mays
  CDS (162)..(2123)
ccaaatcccgaaagcccctgtccccagcccgcctctcaaacccctaatccctagccacaccacgccctcttccctccttccccgttggcttcggcggcgggcggccatcagcaaccagcatcgtacggaggagaagcgctgtttacacccgtctggcagggatgccgctggggcagcgttcgggggacaagagcgactcccgctactgcggggtggaggttctcgacttccccgccggggagggcctccctgccgtcctcaatcactccctcgcctccgccttcgacttcatcctcgcccctctggttgatcccaactaccggccggcgcccggcgccgttctgccagtgtcagcgtcggacctcgtcctcggcccgtcccagtggagcaaccacgtcgtcgggaagatcagcgagtggattgatttggacgcggaggacgagcggctccggctggactccgagctcacgctgaagcaggagatcgcttgggcatctcacgtttcgctgcaggcatgtgttattcctgcccccaggagatctttttgcggcaattatgccagagttgtgaatcaaattttgcaaggcctgaccaatatgaatttgtggcttaggttgcctctggagaagtccgagcctatggatggtgatcttgataaaataaagaacaacaaccacacgctacagagtgaaatagcagactcatgggaattatggaattcattcagattgctatgtgaccatagtagccaactatgcgtggcacttgatatttcgggcacactgccatcaatgaactcattagggcgctggtttggggagcctgtaagggctgctattctgcaaaccaatgcttttcttacaaatgcaagaggatatccttgtttatcaaagcggcatcagaggctgctaactggactttttaatcattctgttcaggcgataatctctgggagatcgaatcacaatgtttttccagcatctgaaggagtgctctcaggcgatgagggcaacgctgaagattcctatgttcgacatgcattagctccgtacctggagtacattgcatacctgtatcagaagatggatccgcttcctgagcaggaacgctttgagattaattacagggattttttgcagtctcctccccagcctctaatggataatttggaagctcagacttacgagacttttgagaaggatgttgtgaagtatactcagtatcgaagagcagttgctaaggccttggttgatagggttgcagatgatgcagtctccacaactaggacggttctgatggttgtgggagcaggccgagggcctctagtacgagcatcattgcaggctgctgaagaaactggtcgcaagttaaaagtatatgctgttgaaaaaaatcctaacgctgttattactcttcatagtttgatcaaattggagggttgggaaagcctggttactgtaatttctagtgacatgcggtgttgggatgcccctgaaaaggcagatattttggtaagtgaattgcttgggtcctttggggacaatgaactatctccggagtgtctggatggtgctcaacgattcttgaagcctgatgggatttccattccttcatcatacaccagcttcatccaaccaataacagcgtcaaaattgcacgacgacatcaaagcacacaaagatattgcacattttgaaacggcatatgttgtgaaactacaccgcatagcgacacttgcacctccacaacaggtttttactttcacccatccaaatttctcaccaaatgccagcaaccaaaggtacaccaagttgcaatttgaaatgctgccagacatgggttcatgccttgtgcacggatttgctggctattttgactctgttctttataaggatgttcatcttggaatcgagccaaacaccgctacaccaaacatgttcagctggttcccgatcttcttcccattgagaaagcccatctacgtgcccgaagggtctcctatagaagtgcacttctggcggtgctgtgcccccacgaaggtgtggtacgagtgggctgtgactacgccgaccccgtcgccgatccacaacagcaatggccggtcctattgggttggtctataataaggcatcaagatcatctttgtgttgtaacagagaggaaaaataacagagatgatatggtttagttctatctgagttgagcagtgtgcttagtgctactggtttctgcctggagagctgatcaaaggatatatgtagcgtgttgttatctgatctgaaagggagtgcttgacccccaacgttgttctactcgattttgctagcgtttcagtaggattcttctagaattgcaaacgttatgctttcgtcagattctgaagcgtctgcatcctttcctttttaaaaaaaaaaaaaaa

SEQ ID NO: 1850 - protein, 653 aa, Zea mays
MPLGQRSGDKSDSRYCGVEVLDFPAGEGLPAVLNHSLASAFDFILAPLVDPNYRPAPGAVLPVSASDLVLGPSQWSNHVVGKISEWIDLDAEDERLRLDSELTLKQEIAWASHVSLQACVIPAPRRSFCGNYARVVNQILQGLTNMNLWLRLPLEKSEPMDGDLDKIKNNNHTLQSEIADSWELWNSFRLLCDHSSQLCVALDISGTLPSMNSLGRWFGEPVRAAILQTNAFLTNARGYPCLSKRHQRLLTGLFNHSVQAIISGRSNHNVFPASEGVLSGDEGNAEDSYVRHALAPYLEYIAYLYQKMDPLPEQERFEINYRDFLQSPPQPLMDNLEAQTYETFEKDVVKYTQYRRAVAKALVDRVADDAVSTTRTVLMVVGAGRGPLVRASLQAAEETGRKLKVYAVEKNPNAVITLHSLIKLEGWESLVTVISSDMRCWDAPEKADILVSELLGSFGDNELSPECLDGAQRFLKPDGISIPSSYTSFIQPITASKLHDDIKAHKDIAHFETAYVVKLHRIATLAPPQQVFTFTHPNFSPNASNQRYTKLQFEMLPDMGSCLVHGFAGYFDSVLYKDVHLGIEPNTATPNMFSWFPIFFPLRKPIYVPEGSPIEVHFWRCCAPTKVWYEWAVTTPTPSPIHNSNGRSYWVGL

SEQ ID NO: 1851 - DNA, 705 bp, Arabidopsis thaliana; identical to SEQ ID NO: 1385
  CDS (1)..(705)

SEQ ID NO: 1852 - protein, 234 aa, Arabidopsis thaliana; identical to SEQ ID NO: 1386

SEQ ID NO: 1853 - DNA, 952 bp, Brassica napus
  CDS (13)..(747)
attttacctacaatggcttcaagaaaaccatcggtgaggcaccctagccacaaccatccattgcgcggtcacaaagccctagctgaagaagagaccatctgctccggctgcgacctagacctaataggtgcagctttcaaatgcacaaagtcagaatgtgattacttcttgcacaagtcatgtttcgatcttccacgtgagacacgccacaagtctcaccctgatcaccctctgaccctgctttattcgccaccgtacgagtcctcaacttacgagtgcagcgcgtgcagtgagtatggatcagggttcgtttacaactgctctatctgccagtttgatttacatgtcgggtgcatatctatgcctgagtccgtggagcgtgaaggacatgagcatccgctaacgttgctttactgttctccttacacgaacggtttgatcgtcaagtgtgacgtatgtcaagagacggttccggatcatctatggtcttattactgcaaggaatgtgactacggcacgcatttacattcttgtgaagtagaagaagtggtggagccaaagagaggaggaggaaaggcgagtacaagtggtaataaaggaggaggaagaggctcggctgcttcggagttagctgcaatgcttgaagctcaaagggagatggataggatgcagattgagttgcatatggagatgcagagagctaagattgcgaagaaagcgagaaaagcttgtctcaagttgatataaaaatatgataaagttgaaaacgtttatgtttctctcgagctttcttggattcttggagctctgaaactatatgattgttgtttttcttgtgttttggttcttgtttttcattgatttgttttatttgctaatttcatgttattttcttttgaataattattaataatctgaaataaaaagatctttaactaaaaaaaaaaaaaaa

SEQ ID NO: 1854 - protein, 244 aa, Brassica napus
MASRKPSVRHPSHNHPLRGHKALAEEETICSGCDLDLIGAAFKCTKSECDYFLHKSCFDLPRETRHKSHPDHPLTLLYSPPYESSTYECSACSEYGSGFVYNCSICQFDLHVGCISMPESVEREGHEHPLTLLYCSPYTNGLIVKCDVCQETVPDHLWSYYCKECDYGTHLHSCEVEEVVEPKRGGGKASTSGNKGGGRGSAASELAAMLEAQREMDRMQIELHMEMQRAKIAKKARKACLKLI

SEQ ID NO: 1855 - DNA, 950 bp, Brassica napus
  CDS (11)..(745)
tttacctacaatggcttcaagaaaaccatcggtgaggcaccctagccacaaccatccattgcgcggtcacaaagccctagctgaagaagagaccatctgctccggctgcgacctagacctaataggtgcagctttcaaatgcacaaagtcagaatgtgattacttcttgcacaagtcatgtgtcgatcttccacgtgagacacgccacaagtctcaccctgatcaccctctgaccctgctttattcgccaccgtacgagtcctcaacttacgagtgcagcgcgtgcagtgagtatggatcagggttcgtttacaactgctctatctgccagtttgatttacatgtcgggtgcatatctatgcctgagtccgtggagcgtgaaggacatgagcatccgctaacgttgctttactgttctccttacacgaacggtttgatcgtcaagtgtgacgtatgtcaagagacggttccggatcatctatggtcttattactgcaaggaatgtgactacggcacgcatttacattcttgtgaagtagaagaagtggtggagccaaagagaggaggaggaaaggcgagtacaagtggtaataaaggaggaggaagaggctcggctgcttcggagttagctgcaatgcttgaagctcaaagggagatggataggatgcagattgagttgcatatggagatgcagagagctaagattgcgaagaaagcgagaaaagcttgtctcaagttgatataaaaatatgataaagttgaaaacgtttatgtttctctcgagctttcttggattcttggagctctgaaactatatgattgttgtttttcttgtgttttggttcttgtttttcattgatttgttttatttgctaatttcatgttattttcttttgaataattattaataatctgaaataaaaagatctttaaccaaaaaaaaaaaaaaa

SEQ ID NO: 1856 - protein, 244 aa, Brassica napus
MASRKPSVRHPSHNHPLRGHKALAEEETICSGCDLDLIGAAFKCTKSECDYFLHKSCVDLPRETRHKSHPDHPLTLLYSPPYESSTYECSACSEYGSGFVYNCSICQFDLHVGCISMPESVEREGHEHPLTLLYCSPYTNGLIVKCDVCQETVPDHLWSYYCKECDYGTHLHSCEVEEVVEPKRGGGKASTSGNKGGGRGSAASELAAMLEAQREMDRMQIELHMEMQRAKIAKKARKACLKLI

SEQ ID NO: 1857 - DNA, 579 bp, Arabidopsis thaliana; identical to SEQ ID NO: 1418
  CDS (1)..(579)

SEQ ID NO: 1858 - protein, 192 aa, Arabidopsis thaliana; identical to SEQ ID NO: 1419

SEQ ID NO: 1859 - DNA, 869 bp, Oryza sativa
  CDS (193)..(639)
ccaacccacacggtccagtcctcctcctcgcgtagacgcggcggccgaggaacaagtccgtcacgcgaaccttccagaacctcacacgtcacgcaacctcctcctctttattacgactactaccaccccctctctcctctccgttccaccgccggattcagattcggagagagctactcctcgtcgttagccatggcgtccaagcggatcctcaaggagctcaaggacctgcagaaggatccccccacctcctgcagcgccggccctgtggcagaagatatgttccactggcaggcaacactgatgggtccatcagatagcccttatgctggaggcgtgtttttggttaccattcattttcctcctgattatccattcaaaccgcctaaggtggcattgaagacaaaggtgttccacccaaacattaatagcaacggaagcatatgccttgatatcttgaaggagcagtggagtcctgcattgactatttcaaaggtgctactctcaatttgctcgctgttgacggatccaaatcctgatgatccattggttccagagattgctcacatgtacaagactgatcgggccaagtacgagtccaccgcaaggagctggacccagaaatatgctatgggctagaatggttaacaataagaaatgtgagatatgccattgtattgccttgtattctcctgtaactctttcaacatttaagaaacagcaagaatcaaattgaactctcgagttgttgtatggaatcctactatagatgttcagctattgtaaattatgtagtgggtggttctattgattgttcgatgagcacttggaatggtacttttatgttccagagtaaaaaaaaaaaaaaa

SEQ ID NO: 1860 - protein, 148 aa, Oryza sativa
MASKRILKELKDLQKDPPTSCSAGPVAEDMFHWQATLMGPSDSPYAGGVFLVTIHFPPDYPFKPPKVALKTKVFHPNINSNGSICLDILKEQWSPALTISKVLLSICSLLTDPNPDDPLVPEIAHMYKTDRAKYESTARSWTQKYAMG

SEQ ID NO: 1861 - DNA, 663 bp, Oryza sativa
  CDS (61)..(507)
cgctttctcatcgctgatcaaacttcaaaccctagctaggatttcaaggtacacttaacgatggcttcaaaacgcattactaaggagttgaaggatctgcagcaggaccctcctgtttcctgcagtgctggccctgttggtgatgacatgtttcattggcaagctacaattatgggtccaactgacagtccttatgctggtggtgtattcctggtgaccattcacttcccaccagattatccatttaagccaccaaaggtttccttccgaaccaaggtatttcaccctaacataaacagcaatggaagtatctgtctggacattctgaaagagcagtggagtcctgcccttacagtttccaaggtgctactttcaatttgctccctgctgacagatcccaacccggatgatcctttggtgcctgatattgctcacatgtacaagactgacagagacaagtacgagagcactgcccgttcttggactcagaaatacgccatgagctagaagaaaatatctttattgttctggtgacagcttatgtgcgcaaaacaagttgtttggggatatgtcagtatataatatacatatacaagtagttctgctttgatactttataataattaaaaccctggattttttttttctaaaaaaaaaaaaaaa

SEQ ID NO: 1862 - protein, 148 aa, Oryza sativa
MASKRITKELKDLQQDPPVSCSAGPVGDDMFHWQATIMGPTDSPYAGGVFLVTIHFPPDYPFKPPKVSFRTKVFHPNINSNGSICLDILKEQWSPALTVSKVLLSICSLLTDPNPDDPLVPDIAHMYKTDRDKYESTARSWTQKYAMS

SEQ ID NO: 1863 - DNA, 642 bp, Oryza sativa
  CDS (23)..(469)
ccctcccctctcccctccggccatggcgtccaagcggatcctcaaggagctcaaggacctgcagaaggatcccccaacctcctgcagcgctggccctgtgggagaagatatgttccactggcaagctacgattatgggtccagcagatagtccatatgcaggtggcgtcttcttggtttctattcacttccctccagactatccgttcaaaccgcccaaggttgcatttaagacaaaggttttccacccaaacatcaacagtaacggaagcatctgccttgatatcctgaaggaacagtggagccctgcattgacagtgtcaaaggtactcctctcaatttgttctctactgacggacccaaacccagacgacccgctagttccggagattgcgcacatgtacaagactgatcgggccaaatatgaatcaactgcgaggggctggacccagaaatatgcaatgggctgaacgacgtaggccgatagtgttctctagcgatatatgttatcttgttgatctagtgttcatgtcctgctacatgcctacatggggtgtaatttcttctgtcactgaatttatgtcaaattctcgattgatggtagaagttattgagaaaaatttcaattaaaaaaaaaaaaaaa

SEQ ID NO: 1864 - protein, 148 aa, Oryza sativa
MASKRILKELKDLQKDPPTSCSAGPVGEDMFHWQATIMGPADSPYAGGVFLVSIHFPPDYPFKPPKVAFKTKVFHPNINSNGSICLDILKEQWSPALTVSKVLLSICSLLTDPNPDDPLVPEIAHMYKTDRAKYESTARGWTQKYAMG

SEQ ID NO: 1865 - DNA, 737 bp, Brassica napus
  CDS (64)..(510)
cgattcgatcatcgtttctcagctcaccgatcatcttcctagaagcagcgagtacagttcaagatggcttcgaaaagaatcaacaaagagcttagggacctccaaagggatcctcctgtctcatgcagtgccggtcctgtgggtgatgatatgttccactggcaagcgactatcatgggcccaactgatagcccattctccggaggtgtgtttcttgtttccattcacttccctccagattaccccttcaagccaccaaaggtttctttccgcaccaaggtttaccacccgaatgtcaacagcaatggcagcatctgtcttgacattctgaaagagcagtggagccctgcgcttaccatatccaaggtccttctgtcgatatgctcactgctgacagatccaaaccctgatgaccctctggttccagaaatagctcacacctacaagacagaccgagtcaagtacgagagcactgcccgatcctggacccagaagtatgcaatgggatgatgatgattggcaataataatccgcaccaatacattgcgcattgtctaagaatatgagaaataagattgaaaaaaaacagagtgtggcgttttgcttggttgctttattagttttatcatcatcttaagccgtgtgttggtttgtgtacatgagctttatattgagacattttgagagcttgcaatgctataaagccaataactggttattataaaaaaaaaaaaaaa

SEQ ID NO: 1866 - protein, 148 aa, Brassica napus
MASKRINKELRDLQRDPPVSCSAGPVGDDMFHWQATIMGPTDSPFSGGVFLVSIHFPPDYPFKPPKVSFRTKVYHPNVNSNGSICLDILKEQWSPALTISKVLLSICSLLTDPNPDDPLVPEIAHTYKTDRVKYESTARSWTQKYAMG

SEQ ID NO: 1867 - DNA, 702 bp, Brassica napus
  CDS (57)..(485)
cttgagatttcccaagatcaaatctaaaaacccttagtagctgactattcaagcttatggcatcgagaagaattaacagcgagcttagggacctgcaaaaggaccctccactgtcttgcagtgccggtcctgtgggtgatgatatgtaccactggcaagcaactatcatgggtccaactgatagcccattcaccggtggtgtatttcttgtttccattcacttccctccagattaccccttcaagccaccaaaggtctatcacccgaatgtcaacagtaatggcagcatctgtcttgacattctgaaagagcagtggagccctgctcttaccatatccaaggttcttctgtcgatatgctcattgctgacagatccaaaccctgatgatcctctggttccagagatagctaacatctacaagtcagaccgtaccaagtacgagaacactgcccgatcctggacccagaagtatgcaatgggatgatatgatggttggcaataatgatccgcaccagtaaattgcgcatttgtctaagaattggggaaataagaaaaacctggatttggcttttgcttggctgcttgatttaattagttttattatcttcttattaagccatgtgtacatgagcgctatttaagccttattgaacatttgatgtctttcttttaatccagtaattggcaaaaaaaaaaaaaaa

SEQ ID NO: 1868 - protein, 142 aa, Brassica napus
MASRRINSELRDLQKDPPLSCSAGPVGDDMYHWQATIMGPTDSPFTGGVFLVSIHFPPDYPFKPPKVYHPNVNSNGSICLDILKEQWSPALTISKVLLSICSLLTDPNPDDPLVPEIANIYKSDRTKYENTARSWTQKYAMG

SEQ ID NO: 1869 - DNA, 569 bp, Brassica napus
  CDS (73)..(519)
aagaaggcggcgaaaacctcgccaagtctgagatacgcgaacccaaaagagatcgtattgtaggttttggatatggcgtcgaagcggatcttgaaggaactgaaggatctgcagaaggatccacccacctcttgtagcgcaggacctgttgctgaagacatgtttcattggcaggcaacgataatgggtccttcagacagtccttacgctggtggtgttttccttgttaccattcatttccctccagattaccctttcaaacctcctaaggttgcctttaggacgaaggtgttccatcccaacatcaacagcaacggaagtatttgccttgacatcttgaaggagcaatggagtcctgctctcaccatctccaaggtgttgttatcgatctgttcattgttgaccgatccaaaccctgatgatcctttggtgcctgagatagctcatatgtataagactgacaagaacaagtatgagtcaactgcacggagctggactcagaagtatgccatgggctgaaatggaaaccccaatctacaaaactctctctttacaaaaaaaaaaaaaaa

SEQ ID NO: 1870 - protein, 148 aa, Brassica napus
MASKRILKELKDLQKDPPTSCSAGPVAEDMFHWQATIMGPSDSPYAGGVFLVTIHFPPDYPFKPPKVAFRTKVFHPNINSNGSICLDILKEQWSPALTISKVLLSICSLLTDPNPDDPLVPEIAHMYKTDKNKYESTARSWTQKYAMG

SEQ ID NO: 1871 - DNA, 757 bp, Brassica napus
  CDS (132)..(578)
cctcttgagatttcccaagatcaaatctaaaaacccttagtaaatccacccacgtgtgtgtgtgtgtgtgtgtgggggggggttctattatcgtatttctagaatattctggtagctgactattcaagcttatggcttcgagaagaattaacagcgagcttagggacctgcaaaaggaccctcctctgtcttgcagtgccggtcctgtgggtgatgatatgtaccactggcaagcaactatcatgggtccaactgatagcccattcaccggtggtgtatttcttgtttccattcacttccctccagattaccccttcaagccaccaaaggtttctttccgcaccaaggtctatcacccgaatgtcaacagtaatggcagcatctgtcttgacattctgaaagagcagtggagccctgctcttaccatatccaaggttcttctgtcgatatcctcattgctgacagatccaaaccctgatgatcctctggttccagagatagctaacatctacaagtcagaccgtaccaagtacgagaacactgcccgatcctggacccagaagtatgcaatgggatgatatgatgatggttggcaataatgatccgcaccagtaaattgcgcatttgtctaagaattggggaaataagaagaaaaaaacatggatttggcttttgcttgcctgcttgatttaattagttttattatcttcttatgtgttgggtgtgtacatgagcagataagaaaaaaaaaaaaaaa

SEQ ID NO: 1872 - protein, 148 aa, Brassica napus
MASRRINSELRDLQKDPPLSCSAGPVGDDMYHWQATIMGPTDSPFTGGVFLVSIHFPPDYPFKPPKVSFRTKVYHPNVNSNGSICLDILKEQWSPALTISKVLLSISSLLTDPNPDDPLVPEIANIYKSDRTKYENTARSWTQKYAMG

SEQ ID NO: 1873 - DNA, 450 bp, Glycine max
  CDS (1)..(447)
atggcatccaagagaatactgaaggagctcaaggacttacagagagatccaccaacttcatgcagtgcaggccctgtgggcgaggacatgttccattggcaagcaaccatcattggtccaaatgacagtccctatgctggtggtgttttccttgtgaccatccatttccctcccgattatcccttcaaacctcccaaggtagcattcaggaccaaggtgttccatcccaacattaacagcaatggcaatatttgcctggacatactcaaagaacaatggagtcctgctctcaccatatccaaggtgctgctctctatatgttctctgctaacggatccaaatcctgatgaccctttagtgcctgaaattgctcatttgtgcaagaccgacaaattcaagtatgagtctactgctagaagctggacccagaagtatgccatgggctaaaac

SEQ ID NO: 1874 - protein, 148 aa, Glycine max
MASKRILKELKDLQRDPPTSCSAGPVGEDMFHWQATIIGPNDSPYAGGVFLVTIHFPPDYPFKPPKVAFRTKVFHPNINSNGNICLDILKEQWSPALTISKVLLSICSLLTDPNPDDPLVPEIAHLCKTDKFKYESTARSWTQKYAMG

SEQ ID NO: 1875 - DNA, 745 bp, Triticum aestivum
  CDS (53)..(499)
gggaccgaaggcagaggagagaacaatccaaagccttcccagacctacagatatggcgaacaaaaggattcagaaggagctcatggatttgcaaaaggatccaccaacatcatgcagcgctgggcctgctggggcggatctattccactggcaggccacaatcatgggccctggtgacagcccctactcaggaggggtgttcttcgtcaacatccatttccctcctgattacccctttaagcctccaaaagtgaatttccaaacaaaggtgtatcacccgaacatcaactccaacggcagcatctgcctggacatcctcaaggagcagtggagcccggcactgaccatatccaaggtcctactctccatcagctccctgctcaccgaccccaaccccgacgacccccttgtcccggagatcgcgcagctctacaagaaccagagaggccgctacgaggagaccgcgagggcctggacccagaagtacgccatgggctgatcgctgcaaagatgaccgtggcatcgtgtaagacaacttctgtgtcgcgccggtttcccgccctctgagtttcgaccccatatctggctttctctgaaccagttttacttgtgtacagttgtcaaaactgggtgatgtttgcatttctgtttccaaactttgggtgtacgccctgtccctgaagacctgtatgtatcaacacagaacatttttaagaatttgtggtgttttaaaaaaaaaaaaaaa

SEQ ID NO: 1876 - protein, 148 aa, Triticum aestivum
MANKRIQKELMDLQKDPPTSCSAGPAGADLFHWQATIMGPGDSPYSGGVFFVNIHFPPDYPFKPPKVNFQTKVYHPNINSNGSICLDILKEQWSPALTISKVLLSISSLLTDPNPDDPLVPEIAQLYKNQRGRYEETARAWTQKYAMG

SEQ ID NO: 1877 - DNA, 849 bp, Triticum aestivum
  CDS (84)..(674)
cctattcccaccgccaccgcgcccccaccggccgcctccagggacagcgagcgagagaggagggagggggctcgtcggagaagatggtggacgtgtcgcgcgtgcagaaggagctgacggagtgcaaccgggactcggacatctccggcgtctccatcgcgctccacgacgggggctccagcatcacccacctcaccggcaccatcgccgggccccgcgacagcccctacgagggcggcaccttccgcatcgacatccgcctaccaggtggctatccctttgagcctcctaagatgcagttcatcaccaaagtatggcacccgaatattagcagccagaatggagcaatttgcttggacatactgaaagatcagtggagcccagcccttaccttgaagacggcattgctatcccttcaagctcttctttctgctcctgcccctgatgatcctcaggatgctgttgttgcacaacagtatctgcgtgacaaggccacatttgttagtactgctcgttactggaccgaggcattcgcaaagagcgactccactggcatggaagaaaaggtgcagaagctggtcgagatgggcttccccgaggacatggtgagaagcgccctgctgagtgtgaatggcgacgagaacatggctctcgagaagctctgctctggctgaaggccctatgtggcctataagaagtgtaaattgcgagcccattcattatggaacaacgatcctagctaatgctcctgttatgccattccggtttggcctataggaacaatatatatatagtggactgaaccatgggactgaactgaagagtgcctatcgtaaaaaaaaaaaaaaa

SEQ ID NO: 1878 - protein, 196 aa, Triticum aestivum
MVDVSRVQKELTECNRDSDISGVSIALHDGGSSITHLTGTIAGPRDSPYEGGTFRIDIRLPGGYPFEPPKMQFITKVWHPNISSQNGAICLDILKDQWSPALTLKTALLSLQALLSAPAPDDPQDAVVAQQYLRDKATFVSTARYWTEAFAKSDSTGMEEKVQKLVEMGFPEDMVRSALLSVNGDENMALEKLCSG

SEQ ID NO: 1879 - DNA, 854 bp, Glycine max
  CDS (180)..(626)
agagagagagcgagcgagcgagcagtttcaaagagaggatttgggattgggaaggcgagggattgcgctgcgtctcttcctcttctctttcgattcatccctcattcataatcttccaatccaacaacctcagcctcacactcacacatacacacatctgaacgcgtatcgtccctcccatggcttcaaagcgcatcctcaaggagctcaaggacttgcagaaagacccaccaacttcttgcagcgctggtccagtagctgaggacatgttccattggcaagcaacgattatgggtcctgctgatagtccttatgctggaggtgtattcctagtcactattcactttcctccggattatcctttcaaacctcccaaggttgcctttaggactaaggtgtttcatccgaacatcaacagcaatggtagcatttgtcttgatatccttaaggagcagtggagccctgcactcaccatctctaaggtactgctttctatctgctcattgctgactgatccaaatcctgatgatccacttgttccggaaatcgctcacatgtacaaaactaaccgggccaagtatgaggccactgcacgcagctggacccagaagtatgccatgggctgatttgtgtttagataatgtatattgaaatggatggcatctatgaaaacttttgtgggtttgcttttctcttcctgtttttctggggtaagattatgtttgttatgaggggatagggaagggcggtgtcttaatttgataaaaataactatgttcaacaaccactgtgatgtttttatcatgatgcgaacgcatgaacaagatgttatttgtgtcaaaaaaaaaaaaaaa

SEQ ID NO: 1880 - protein, 148 aa, Glycine max
MASKRILKELKDLQKDPPTSCSAGPVAEDMFHWQATIMGPADSPYAGGVFLVTIHFPPDYPFKPPKVAFRTKVFHPNINSNGSICLDILKEQWSPALTISKVLLSICSLLTDPNPDDPLVPEIAHMYKTNRAKYEATARSWTQKYAMG

SEQ ID NO: 1881 - DNA, 450 bp, Linum usitatissimum
  CDS (1)..(447)
atggcttctaagcgtatcctcaaggagctcaaggatttgcagaaggatcctccctcttcctgcagcgcaggtcctgtggcggaggacatgttccactggcaggcaacgatcatgggaccctctgacagtccttattctggaggtgttttcctggttacaatccatttccctccagattatcctttcaagcctcccaaggtagcatttaggaccaaggtctttcaccccaatgtaaacagcaatgggagcatttgtcttgatatcctgaaagagcagtggagcccagctcttaccatttcaaaggtactgctgtcaatatgctcactattgacggatcccaacccggacgaccctctggtgccagagattgcacacatgtacaagacagaccgtgccaaatacgaggcgactgcatgcagctggactcagaaatatgccatgggatgacga

SEQ ID NO: 1882 - protein, 148 aa, Linum usitatissimum
MASKRILKELKDLQKDPPSSCSAGPVAEDMFHWQATIMGPSDSPYSGGVFLVTIHFPPDYPFKPPKVAFRTKVFHPNVNSNGSICLDILKEQWSPALTISKVLLSICSLLTDPNPDDPLVPEIAHMYKTDRAKYEATACSWTQKYAMG

SEQ ID NO: 1883 - DNA, 827 bp, Linum usitatissimum
  CDS (224)..(670)
gcaaagccaaaaaagaaaaaagtagacgaatcgggaactgcgtgcatggcaaggactcccccgcaaatttagcgccgaacccttctccgttgtataaatacaatctacagttgctgagttgatcttcaatctctccccgccgtcgttccacactctctcggagtcagctgagtttcgccggagttcactgccgatattccttatagacttctgaagctggaagatggcttcaaagaggattaacaaggagctcaaggacttgcagaaggatcctcctgcatcatgcagtgcaggacctgctggtgatgatatgttccattggcaagcaactataatgggtcctccagatagcccttatgccggtggtgttttcttggtcaccattaacttccctccagattatccattcaagccacccaagtgctcgttcaagaccaaagtttatcacccgaacatcaacagcaacggaagcatctgcctcgacatcctcaaagaacagtggagtccagctctcaccgtatcgaaggtgctgctgtctatttgctcgctgctgacggaccccaacccggacgatccactggtgcctgagattgctcacatgtacaagaacgacagaaccaagtatgagaacaccgctcgtgcctggacccagaagtacgcaatgggttaaacatctcgtcgagttcggatgatataagaaaagaggaatttgtagtctttctccagctgaaaaaccattctatgaacttgaatctcctcattgtataaataaattgctacttggatttcttaaggtttcggagtttcgaactaaaaaaaaaaaaaaa

SEQ ID NO: 1884 - protein, 148 aa, Linum usitatissimum
MASKRINKELKDLQKDPPASCSAGPAGDDMFHWQATIMGPPDSPYAGGVFLVTINFPPDYPFKPPKCSFKTKVYHPNINSNGSICLDILKEQWSPALTVSKVLLSICSLLTDPNPDDPLVPEIAHMYKNDRTKYENTARAWTQKYAMG

SEQ ID NO: 1885 - DNA, 1157 bp, Linum usitatissimum
  CDS (308)..(889)
ggcccaaacatgagggattttctatgttaactacccttcccatttaccctacacaacctccatccgctccaaactctctcctctccgataagtctgaactccggcgtctactggagccttccccggcgtccagcttccttctccgaagtggcggtgctggtttgagatcaggggaaagatagagaccatttgctgtctccttcaacccagtaaacagtggactaggtgttgaagtacttcccggagaagactgctgctcgattagggttccatcgatttctcccagttgagtagagtggttgctactatgatcgacttcgctcgagttcagaaggagctccaagaatgcagcagagacattggagcttccggcatcaaggtttcccccaactccgacagcctagctcgcctcagtggcaccattcctggccctattggcactccttatgaaggtggctctttccaaattgacatctcccttccagatgggtacccgttcgagcctcctagaatgaagttcgtgacgaaagtctggcacccaaatattagcagtcagagcggagctatttgccttgatatattgaaagaccaatggagccctgctctaactctgaagacagctctactctccgttcaagcactgctctctgctcctgagcctgatgaccctcaagatgcagtagtagcacagcagtatctcaaggattaccagacctttgttgggacagctcgctactggacagaaacttttgctaaggtctcatctctcggtgttgaagaaaaggtacagaaacttgttgaaatgggattccctgaagctttggtgaggagtacactggattcagttggtggggacgagaacttggctctggagaggctgtgttcttgaaggatcccagggttaaggtttgatatgaagaatgtatagaggctctcctaagtaactagttatttttgtaagctacttccttttgtttatgatatcctcctgaattgcgagaagtgaacatctgtgtgagacgattgatgacccacaactgtagggcatccatttatcggcaacttattcagcaagggctgaagagttgcctaaactgattaatatatatatgggcccgtttgataattttgggcttatttggaaaaaaaaaaaaaaa

SEQ ID NO: 1886 - protein, 193 aa, Linum usitatissimum
MIDFARVQKELQECSRDIGASGIKVSPNSDSLARLSGTIPGPIGTPYEGGSFQIDISLPDGYPFEPPRMKFVTKVWHPNISSQSGAICLDILKDQWSPALTLKTALLSVQALLSAPEPDDPQDAVVAQQYLKDYQTFVGTARYWTETFAKVSSLGVEEKVQKLVEMGFPEALVRSTLDSVGGDENLALERLCS

SEQ ID NO: 1887 - DNA, 875 bp, Zea mays
  CDS (91)..(537)
cctccttcaaagccctctggcgatcgagattcttccccctccgtctccaggtatacccatcggagcagcacagacaagagttctcctgatatggcaaacaaaaggattcagaaggaactcatggatctgcaaaaggacccaccgacatcatgcagtgcagggccagctggagaggatctattccactggcaggccacaatcatgggtcctagcgacagcccctatgcaggaggggttttctttgttaatatccattttcctcctgactacccgtttaagcctccaaaagtgaacttccaaacaaaagtttatcacccgaacatcaactctaacgggagcatctgccttgatatcctcaaggagcagtggagccctgcactgaccatatcaaaggtcctcctctccatcagctcgcttctgactgaccccaacccagacgaccccctcgtccccgagatcgcccacatgtacaagaaccagaggccgcgctacgagaaaaccgcacgggcctggacccagaagtacgcgatgggctagctgattctgtctcgccgaacaatactgtcactggcaagaagatcatcatcacgatgttgtaagaattaagttgaaccggtttccccgtcgtgtgatggtattaagaccaaagttcttgtgcgtgtacagtacttttgaagctggatagtctgaatcctgtgccagtaccaaaggtcttcgctttgttccctgaagagcgtttgtgaccatagaatctgcatgcgtaaccttgccagccaagaaaacagtagctgcttgtatgatgtcgagatgatatagttcagatgggtggaaccgtgcagatgaaacagtccagtggtcttgcgcaaaaaaaaaaa

SEQ ID NO: 1888 - protein, 148 aa, Zea mays
MANKRIQKELMDLQKDPPTSCSAGPAGEDLFHWQATIMGPSDSPYAGGVFFVNIHFPPDYPFKPPKVNFQTKVYHPNINSNGSICLDILKEQWSPALTISKVLLSISSLLTDPNPDDPLVPEIAHMYKNQRPRYEKTARAWTQKYAMG

SEQ ID NO: 1889 - DNA, 755 bp, Linum usitatissimum
  CDS (17)..(478)
aagaaaagaaacctcaatggcgaacagtaaccttcctcggagaattatcaaggaaacgcagcggctgctcagtgaaccagcccctggaattagtgcttccccttctgaagaaaacatgcgatacttcaatgttatgattcttggtccaacacaatcaccttatgaaggtggtgtttttaagttggaattgttcttgcccgaagaatacccaatggcacctcccaaggttcgcttcttgacgaaaatttatcaccctaatattgacaagcttggaagaatttgccttgatattctgaaagataaatggagccctgcactccagatccgaactgttctgctaagtatccaagctctcttgagcgcaccaaatcctgatgatcctctgtctgagaacattgcaaagcactggaagtcaaatgaagctgaagctgttgaaacagctaaagaatggagccgcttatatgcaagtggtgcatgaggaggcaagctggagcagtgcaaatgatctatgttgtttcttgttacattggttaaatgaatttgaaatgtaatgtctgttggttcctaaaatgggaaatatgcttcaatgtatgctctgaacactatcagatacatgaatccttaaagagtctcgagtcttgaatcgcagcagtactctcctttcagtatactggacctgtatcatacagcgtcattggaagcttccctttaattgacttgcgataatgactgattgactgaaaaaaaaaaaaaaa

SEQ ID NO: 1890 - protein, 153 aa, Linum usitatissimum
MANSNLPRRIIKETQRLLSEPAPGISASPSEENMRYFNVMILGPTQSPYEGGVFKLELFLPEEYPMAPPKVRFLTKIYHPNIDKLGRICLDILKDKWSPALQIRTVLLSIQALLSAPNPDDPLSENIAKHWKSNEAEAVETAKEWSRLYASGA

SEQ ID NO: 1891 - DNA, 834 bp, Linum usitatissimum
  CDS (88)..(534)
cgccccaactctcttccgcagaaatctccgtttcgccggcgacgaggaggatccgatctctagctttctctccacagggtctcggcgatggcgtccaagcgcatcttgaaggagctcaaggatttgcagaaggatcctcccacgtcttgcagcgctggtcctgttgcggaggacatgttccactggcaagcaacgatcatgggtcctccagatagcccttattctggtggtgttttcctggtcactatccatttccctccggattatccattcaagcctcccaaggtggctttcagaacaaaggtgttccacccgaatatcaacagcaacggtagcatctgtctcgacatcttgaaagaacagtggagccctgctcttaccatatccaaggtgttgctctcgatctgctcgttgttgacggatcccaacccggacgacccattggtacccgagattgcccacatgtacaaaacagacaggcacaagtacgagacgactgcaaggagctggacccagaagtatgccatgggatgaaaatttgagagaggaaaaggaacaagaactctgctatcagtctatctctctctctctctatctcagttggtatgtattaatttgtcctttgttgtgctttgctcttcagaaactatgaacgaggggctttaaaagtttggctctccattaacatttccccccctcgtgaagaaagaaaaaagaagagagacccaaagaaagagatgtttggtctcgttctctcttctttgttgtatggataatttgatgttcgcaaacgattcgaaaagtaaagtgttcttctccaaaaaaaaaaaaaaa

SEQ ID NO: 1892 - protein, 148 aa, Linum usitatissimum
MASKRILKELKDLQKDPPTSCSAGPVAEDMFHWQATIMGPPDSPYSGGVFLVTIHFPPDYPFKPPKVAFRTKVFHPNINSNGSICLDILKEQWSPALTISKVLLSICSLLTDPNPDDPLVPEIAHMYKTDRHKYETTARSWTQKYAMG

SEQ ID NO: 1893 - DNA, 811 bp, Helianthus annuus
  CDS (187)..(633)
attccaatgtcgccaaattcattcaaaaccctaattttcccccaatttcatctccattagctctcaatcttctcattttcgatcccaaatcatccaattcttccgttttcccttgcttccgcatctcctcgatcagggtttggtttgttgacgtgagaggaaagtttcggattgtaaggtgtggtgatggcgtcaaagcgtatcattaaggaactcaaggatttgcagaaggatcctcctacgtcatgcagtgctggtcctgttgctgaggacatgtttcattggcaagcaacaataatgggaccttcggatagcccttactctggtggggtgtttctcgtcaatattcatttcccccctgattacccatttaagcccccaaaggttgcatttaggacgaaggtgtttcatccaaacatcaatagcaacggtagcatatgtttggatatcctcaaggaacaatggagtccagcactaacaatctccaaggtgttgctttccatctgctcactgttgacagacccgaaccctgatgatccgttggtgccagagattgctcacatgtataaaaccgacaagtccaagtacgaggccactgctcgtagctggacgcagaagtatgccatgggctaatctctcgagtctcgtttgaatcaaatcgattgttggaagaataaaaaatgttggtttttcactttttattcttggaatgtctcaatgaagaaatggttgttaagattgtctcagtttgtgtaatattgaaatgattttaatcaaagagactcattttagaaagaaaaaaaaaaaaaaa

SEQ ID NO: 1894 - protein, 148 aa, Helianthus annuus
MASKRIIKELKDLQKDPPTSCSAGPVAEDMFHWQATIMGPSDSPYSGGVFLVNIHFPPDYPFKPPKVAFRTKVFHPNINSNGSICLDILKEQWSPALTISKVLLSICSLLTDPNPDDPLVPEIAHMYKTDKSKYEATARSWTQKYAMG

SEQ ID NO: 1895 - DNA, 810 bp, Helianthus annuus
  CDS (123)..(707)
atcaccaaatcaattcatattcctaaaccctaaacacagaaacaaacaatcctcaggtgattgtgattttatcccccaaacaaaacattccctcacttcaattccagttgctcaaacaaaacatggtggatttcggtagagtgcaaaaggagcttcaagactgcaacaaagacatcaatgtctctggtatccgcgttaaccctaagctcgacaatctcatcaatttgatcggcaccattcccggccctgttggcactccttacgaaggcggaaccttcaaaatcgatatcgatttgcccgatgcatacccttttgagccaccaaggatgaaatttgctactaaagtctggcacccgaatattagcagccaaagcggggccatttgcttagacattttgaaggaccagtggagcccagcccttactctgaaaacggcacttctttccatacaggctttactctccgcccctgaacctgatgacccacaagatgcggttgtggcacagcagtatcttaaagattatcaaacttttgcaagcactgctcgttactggacagaatcgtttgcaaagacatcatctctaggggttgaagataaggtgcaaaagctcgttgagatgggatttcctgaaggcatggttaggagtaccttggaagtggttggtggcgacgaaaatttggcgttggagaagctttgttccggctaattataattgtttatgttttttttaatcaacaaaggaaggagaaccttgaaatcaaatgataaatatgaaatggaattgtgtgtttgtgaaaaaaaaaaaaaaa

SEQ ID NO: 1896 - protein, 194 aa, Helianthus annuus
MVDFGRVQKELQDCNKDINVSGIRVNPKLDNLINLIGTIPGPVGTPYEGGTFKIDIDLPDAYPFEPPRMKFATKVWHPNISSQSGAICLDILKDQWSPALTLKTALLSIQALLSAPEPDDPQDAVVAQQYLKDYQTFASTARYWTESFAKTSSLGVEDKVQKLVEMGFPEGMVRSTLEVVGGDENLALEKLCSG

SEQ ID NO: 1897 - DNA, 619 bp, Helianthus annuus
  CDS (31)..(477)
gccctaaggcagtgtgatcaaaatcttgtgatggcttcaaagaggattcaaaaggagttgaaggacttgcaaaaggacccccctgcttcatgcagtgctggccctgctggtgaagacatgttccattggcaagcgaccattttgggtccttcagatagcccgttttctggaggagtatttctcatctccattcacttccctccggattacccatttaagccaccaaaggtttccttccgaaccaaggtattccatccaaatataaacagcaacggtagcatctgccttgacattctcaaagaacagtggagtcctgcacttaccatctctaaggttttgctttcaatttgttcattgttgacagacccgaaccctgatgatccattggtgcctgagattgctcatatgtacaagaatgatagggccaagtatgagaccaccgctcgagcttggacccagaaatatgccatgggttaatcattagttagggtatgtggaatgctttctagtcgaataaaaaaaccaactctttgacataaaaatttggttgagcacttgggcttgacacctctagcaactttataaaaaacatatatcatgtggcaaaaaaaaaaaaaaa

SEQ ID NO: 1898 - protein, 148 aa, Helianthus annuus
MASKRIQKELKDLQKDPPASCSAGPAGEDMFHWQATILGPSDSPFSGGVFLISIHFPPDYPFKPPKVSFRTKVFHPNINSNGSICLDILKEQWSPALTISKVLLSICSLLTDPNPDDPLVPEIAHMYKNDRAKYETTARAWTQKYAMG
